United States Patent Application Publication US 2022/0211063 A1 - sequence listing, part 8

SEQ ID NO: 8 - DNA, 7752879 bp, Penicillium roqueforti (residues 3,876,441-5,814,660 of 7,752,879)
  misc_feature (471)..(2988): n is a, c, g, or t
  misc_feature (125072)..(125245): n is a, c, g, or t
  misc_feature (177030)..(177805): n is a, c, g, or t
  misc_feature (384129)..(384319): n is a, c, g, or t
  misc_feature (555860)..(555885): n is a, c, g, or t
  misc_feature (601274)..(601374): n is a, c, g, or t
  misc_feature (676765)..(677109): n is a, c, g, or t
  misc_feature (719635)..(719834): n is a, c, g, or t
  misc_feature (1142860)..(1143077): n is a, c, g, or t
  misc_feature (1186408)..(1187030): n is a, c, g, or t
  misc_feature (1335891)..(1336062): n is a, c, g, or t
  misc_feature (1623998)..(1624186): n is a, c, g, or t
  misc_feature (1638152)..(1638319): n is a, c, g, or t
  misc_feature (1653332)..(1653453): n is a, c, g, or t
  misc_feature (1825656)..(1825836): n is a, c, g, or t
  misc_feature (2226455)..(2226603): n is a, c, g, or t
  misc_feature (2393442)..(2393608): n is a, c, g, or t
  misc_feature (2448145)..(2448283): n is a, c, g, or t
  misc_feature (2535420)..(2535533): n is a, c, g, or t
  misc_feature (2537093)..(2537315): n is a, c, g, or t
  misc_feature (2854224)..(2854262): n is a, c, g, or t
  misc_feature (2984634)..(2984883): n is a, c, g, or t
  misc_feature (3020936)..(3021095): n is a, c, g, or t
  misc_feature (3033772)..(3034149): n is a, c, g, or t
  misc_feature (3159378)..(3159499): n is a, c, g, or t
  misc_feature (3215603)..(3215868): n is a, c, g, or t
  misc_feature (3224663)..(3224965): n is a, c, g, or t
  misc_feature (3317546)..(3317826): n is a, c, g, or t
  misc_feature (3542230)..(3542405): n is a, c, g, or t
  misc_feature (3623237)..(3671736): n is a, c, g, or t
  misc_feature (3674276)..(3676312): n is a, c, g, or t
  misc_feature (3691086)..(3691320): n is a, c, g, or t
  misc_feature (3731831)..(3732089): n is a, c, g, or t
  misc_feature (3989186)..(3989361): n is a, c, g, or t
  misc_feature (3992145)..(3992256): n is a, c, g, or t
  misc_feature (4101501)..(4101938): n is a, c, g, or t
  misc_feature (4339075)..(4339204): n is a, c, g, or t
  misc_feature (4339582)..(4339886): n is a, c, g, or t
  misc_feature (4384249)..(4384411): n is a, c, g, or t
  misc_feature (4533861)..(4534087): n is a, c, g, or t
  misc_feature (4697184)..(4697354): n is a, c, g, or t
  misc_feature (4793975)..(4796690): n is a, c, g, or t
  misc_feature (4802292)..(4802664): n is a, c, g, or t
  misc_feature (5082703)..(5082846): n is a, c, g, or t
  misc_feature (5096885)..(5097041): n is a, c, g, or t
  misc_feature (5239633)..(5239771): n is a, c, g, or t
  misc_feature (5277986)..(5278170): n is a, c, g, or t
  misc_feature (5381360)..(5381559): n is a, c, g, or t
  misc_feature (5479545)..(5479976): n is a, c, g, or t
  misc_feature (5512536)..(5512732): n is a, c, g, or t
  misc_feature (5631457)..(5631544): n is a, c, g, or t
  misc_feature (5721942)..(5722166): n is a, c, g, or t
  misc_feature (5729059)..(5729204): n is a, c, g, or t
  misc_feature (5774252)..(5774341): n is a, c, g, or t
  misc_feature (5808718)..(5808762): n is a, c, g, or t
  misc_feature (5833194)..(5833311): n is a, c, g, or t
  misc_feature (5846751)..(5846942): n is a, c, g, or t
  misc_feature (5859879)..(5864600): n is a, c, g, or t
  misc_feature (5865581)..(5948580): n is a, c, g, or t
  misc_feature (5949161)..(5949595): n is a, c, g, or t
  misc_feature (6008652)..(6008740): n is a, c, g, or t
  misc_feature (6324675)..(6325396): n is a, c, g, or t
  misc_feature (6373521)..(6373881): n is a, c, g, or t
  misc_feature (6805860)..(6805862): n is a, c, g, or t
  misc_feature (6847293)..(6848308): n is a, c, g, or t
  misc_feature (6999877)..(7000009): n is a, c, g, or t
  misc_feature (7043639)..(7047446): n is a, c, g, or t
  misc_feature (7057193)..(7057698): n is a, c, g, or t
  misc_feature (7108603)..(7109374): n is a, c, g, or t
  misc_feature (7114511)..(7115199): n is a, c, g, or t
  misc_feature (7152289)..(7152484): n is a, c, g, or t
  misc_feature (7347604)..(7347710): n is a, c, g, or t
  misc_feature (7355867)..(7355871): n is a, c, g, or t
  misc_feature (7379349)..(7379623): n is a, c, g, or t
  misc_feature (7441770)..(7441995): n is a, c, g, or t
  misc_feature (7525120)..(7525239): n is a, c, g, or t
  misc_feature (7750736)..(7752649): n is a, c, g, or t
tccgcccctcgtggaattgaccgggtacatctgtctcatagtggagcagctcgcctccaatagaatccaggtgctggagaaggcattggaattcggtaatttgtagcatggttacggcgtagtgtgaactagagatacttcgtgttgattgtagctccactgttcggagtactccgtagttgttattgccacgccaggagtggggttgaaaattgtgtcgacttgcagggtagtacacttcaaccctgtcgatttagacccccttaatatcggaatccttaatgtcggaatcagcacttcgtatgttgtactatatttacaatcttgctggccagaattaattagcttataatagggcacaaaggcctaggcccagaaatgtgaacttgtggaatagggctcactacccacgtgatctgttatattgtccttcactctttctttatttaaataccaaccagtaatatcttgtatcttgtaaagaattaataaaagataccttactttactggacaaccttggaattaaatcaacggggtttgggtcttgactgtgtattggcccgtggatctactggttcaccggctccactctccggggcccgggggccgagcccctgcgcacgctcccctcggtaaatcgggcattgttgtacggagaacttccgtactcagaatctcagcttgaccaacacgcccagactcgagaatctcttcccacagataaagtgcggagtatttcggagatagtttcctttcgaatcaatcaactgcaaaatcaatgattagctcgctcagtaccaggcacaccttgctttggcgggacaagactccttgcatgagaaggatgcatgattgggactgactgtagattgaaaaccccgttgtctgattggcatcttgtcttcttcctctttgccatcactctcactatgacccccctcatacccctcgccctgctcagcctcatctcctacttcatatactaccatgttataaagccctacttcctctctccactctcttccatccccaatgctcacttcacgtcacccatctccagcggctggattgaccgcaagcgcagcacaagcacggaagtcctcgccatctacgccctacaccaaaagcacggccccattgtccgtctcggcccaaaggagctgagtgtcaattctctccaaggtctgaagataatatataccggcgctttcgagaaacatccgttctacaacgatgtcttcgtcaacttcaacaccgaaaatttggtcggcatggtccacaatgcgccgcacgcgcaccaaaagcgcatgctgagcaagatttactccaagtcatatctccaggaatctagtgatctgcgggcgatctcaaaagttgtgctttgggaacgattgatgcctattctcaagaaggtgggggagggtggagaggtggtgaatgtgctgcccctcttccaggctgttggaatggactttacctcctctttcctgtttggattgagacacgggacgaggtatttgtttgatattcccgagtggaagttatggttggaagagtatgagcggttcaagtatttgagtcgagacgatcggtttatgggattcattgaggggtggtgcttagggttatgcgcgggggtggaagcatctcaaaagcaggacgtcttcggcgatgaggacaaactgccatccacgaacccagtcgtctacgaccagctgcaccagagcctcctaaaccagaaggaatacgattcgcgtccgttgaacctagtagttgcgtccgaattactggaccacctaattgcaggccacgaaacgtcaggaatcaccttcacgtacatgatgtgggagctatcgcagcatccagaggttgaggccgagctgcgaaaggaacttcttaccttatcgccatccctccaatacccagccacagacggagagaaacccctccccgctccttccgcgatcgacgctctccccctgctggacgctattgtccgcgagactctccgtcttcactccccagccccaacacaactcccccgcgtgaccccaaccacagaaaaaggaacttctctgcacggatacgacagcatcccaggcggtgtgagggtcagctcaacagcctactccctccatcgcatcagcgaggtctacccgcgcccgctggaatggctgcctcgacggtggatcgaggcaggagacaatattcatgacatgaggcggctgttctgggcgttcgggagcggtggacgcatgtgtctggggagtaatttcgcattgcaaggtatgcctcccgagtatgggtttcggagaacacactaatgatgcagaaatcaaattggtcatggcggctgtatattcaaattacacgacgtctattgtcgacgacgagggtattgagcaggaccacgctttcatctcgctgccacgtgggcggaagctgatgttgaggtttatcccggtctatgaatgatgcgatgcagtcatgatgatatcaaaagtaatgaaaagcttttttttaatgctttgaccatgtctcaccaacggtcttgagcacaatgtcgacttctctccgcaatttctgattgatggaggagtagagacatctggatagatcattggcgatgaaaatagtcctctaggaacgagtaactcaccttgcgtacacaactagcgccacctggttgttggtgtcaatatgaatacgctcaatatatatcattggttgtattcagcctttagcttcatattattgtttagttacatattcatgaatcaaaagatcattaaacttggttactgttattatagcattatctttcatatagaacatagtggctaatcgatcctcatgatgattaggcaagctttgattccaaagacctcaacaaactccgagccaccaagaaagccatatcggactttcttcctaggtattgaagcgcacggatcaaaaactcacaattctgccggaagcactcagtatacatcttctgatctgtgggaacatccaagttctctaccaagatatatcccgccttggcaaaacaatgaactagcacagccgtccacggttcgactaggaaggcaacttcactgagagaatcgtggaaatgatggttcatgaacgattcctgcccttgtatcgaagcccgggcaagtccaccaactgccaacgcattattcattctaagcgtagcaaccaagtgtgtagtttgtcgagcctcacgtgcaagatcagagccaagtctgcatttatcaatgctctctagtacgtccgccaaaagcatcgtggcgaggtgccagtggccgtcgaggatgacataccacgactgtatgcgagacggaagcagttcatggttggtgacgcaatcaaccatgaaactctggtatgtggaatcccagtgttggcagaccaggagggtcttctggataatattttcaatatgctcgggacttgcgcctcggtagaccatagtttgaagttgtgtcacccgacggtaaaggagcactttgacaggagtcgcctctgaaagtatggatgcggcttcttcgtaggagcatggccacctcggctggatttggctcgatccctgacgttgtattgaagaccgaagaaataaatctccccagacgtcttctttcccgtgggcattgcttggaatattccaggggtcgaaattaatcggatctctgggctctcctattggcgaagttgttgaaatttgactatcctcatccgacactactaaagggcgctgatacattgcagcactcagggtatcaaacataacacctagccaaaacatcagatctagcgtagtgcggtgttcatgactagtcaggagtggatcaagtggaggctccgacggttgtggtattcccagcacattcgccgttgtctggtctatcgggcccctcccaagccctctcattttaggagcagcctcccgctgcagtctcgtgaacttgtgccggaaagtgaaaatttgacggttggcagattccaaaaatattggagcgcgatcattctctaaaagctcccccaagcttgtttcctgtcctttgtccagcggactttgtgtcaaagagaaaattatgttcgcgaaggcgatgcgaaaagacggaatactgctcgaatgctccaaagcgtgccgtgcttcgttccagactttctgtcggatcgacctctcatcattgtcgattgccgaggggaccgacgcaccggtgcccttctgcgcatgttgagcccactgagatgcaaatgacataatcgctagatgaagcgcccgagctgcctttgtatcttcttccgcacttaaagctctgccgcgtattgaggatgatactcgatccaactgacagacccgaatacacatcctgttcgaccaattcggtccccattctttcatgcctcgatcgggaaccacttgactgatcgagtcactgtaaggacagttgtgctctgtcaaccaacatgacaaagcattctccatgctgtcgtggtaaatgcggactaggttgcgcgacattgtcgcccgagcgctttgcttagctgtattttcggacgcgatgcaaaagttccattgcggtggcgtgtttgagcttcggtcagacgcagactcggacggatgtttctgtcgactcggtttccacgttgaaaccgttgatataagatcagaggtgggtgtatattcctgttgtggcaataagctgtatgtgctgccgacagaacttggtgccaaatccaaaagggcgtctgattccgcggagtctggggatccattcggcattgagttattaatttgcaaatcgtatgggatgttcatcgcccatggaaatgattgcgactggtcatcgcttgaattttgggtttggaatgactccataaagtgattttccgggtgtgacgatgatgaggacgaggcgtaatccgaggtttcaggggacccaagcaattcaggcaattctccaagatcggcgggatgcgtttgtgcagagcgcagtatctcctcaagagcttcgtcatgagagcctacgacagatgcttttgcggtgttggttttgattcgttttcgactccctctcgagtccacgcgctttgaggagatccagttgaatgtgcactcctttttccatcgtgtgcagtttgagcaagtactgaatgtgctcttttggcgatctttctaagtataaaagttagcgaccgccgtggatgacacagaaacatgttaacgaacaggtgcgtcgcagcctcttttgcccttgcgacatggatcacagctatgaagctgacgccgacgggagtcttccatgctaagctattgcatgtattattggtgagttatatgtaccggaaagaaggcagatgggtggccccgatatgcggaagaagtacgaaaggggcctccagaccaagatatttcataattcctgggggaacacgtgaactttgcagagtgcggagtgagtttaagtggggtaaaaggtaaaagtgggggagctagggcttgtatccgtccatggctcgacacgagtcatcttcggtccagaggaactgtgattggacattgctcgagtatagaatgcttcaagtagataatatctggtgtgccaggttatagaaacatctgggtctgacgtgtaaagaatccaaggctgtgaacagcactggttgacctcaggttacagcgcaggaggtggcgcattcttgcgatgacgccgatcggccaattgtctcaccgagaccgagccaatcgtataagcccaccgtcacgggatgtggtcacgggctcgcccgcagttactaaaatatcagagattgatcttcaatgtgatcgaccaattgaacgggtaggcagcgtcgtggttgtgattttacatacattaaggggtaagattttccccacagaatgcccgcccaatttatccttattctggtctgatgaaccagctctccaatcaattgatgatgtaatcaattgatatgcttggctgactgggcacggtctacaagaacttttacagtagctacgtccaagaatgatttctgcacattgcactcaatactcaatatgtagagttgattttctatggtatttacaaattggaaccaaacagctattgaaaaccttcccagcgatctgaagctcacgacttttggaggtgaacgcggactgtcttcacctccgtgtagttctccagggcgtatgatcccagctctctgccgatacctgactccttgaaaccaccgaatggcatttggtagtgaagggtgttgtagttgttaacccagacggttctattgcaagatatgttagcgaattcatgaagctcagagactagctttgcttttcaattgactcacccagccttgacagcgttggacactctgatggcagtgttaatgtttgtggtgtggacagctgcggccaagcctattttgatccgttagtcagatcatggaagtcaaatggaatgtaacatctcggagtacttaccgtagtttgtggaattggccactctgatagcctcctcctcggtggagaatttctgcaccgtgcacacaggtccaaagatctcttctttgacaatcgtcatgttctcgtcgacatcagcaaagattgtgggttgaatgtagtatccttcgctgccatgacgatcgccaccagtgacaacagtggcgccagcaccctttccgtccttaatataacccatgatccggtcatattggagctgcgagacttgcggtccctggaaggtctcggaatggaacggatctccgaccttgttctgctctgttcgcttcttgaaaagctctaggaacttgtgatagatgtcttcgtgaacaagaatgcgagagcctgcacaacagcactgtccatggttgaagaagatacccagattgacccattcgattgcatcctccaagttcgcatctgggagaatgatgttcggcgacttgccgccgagctcgagagtgactttcttcaagttactatcggctgctgccttcatgatgtgacgtccgaccagagtcgatccagtgaaagcaaccttgtcaatatccatgtgagaggcgattgctgcaccggcagttcttccgaatcctgaaataacattgaccactccaggggggaatccggcttccttgataagcttggcgacatagagcgctgaaaggggagtttgctcggctgtcttgataacaattgtatttccggtggccagagcagggccaattttccaagcgaacatcaagagcgggaagttccatggaataatttggccacagacacccactggctcgtggcgcgtgtaggtcaagctgttgctatcagtgtcgatggtttggccgtaaatcttgtcggaccagccaccatagtaccgcaggcaccctgcggagttatttacatcccctttggccattgtcactgacttgccgttatcaagtgcttcaatagcggccaatgtttcgatgtcgcgttctaggaagtctgcaagacgaagaaggagacgaccacgttcggatggcgtaattgttttccactctccattcagtgcggtacgagcagctttcacggcaatgttgacatcttcctctgcgccttcgtgcacggcgacaataggcttctcgttgtgagggttgattgtctcgaaggttctgccggccacacccttgatgaattcattgttgatgaatcttatggttttgtcagtttcttgcccaggatcattaaggtttgttaaacttacagtcccaaaggttgctcatatgtgagcacgggggtcttaatcgattggaaaagtgccatggttggaaagagaagtcggtggtatagactgaacaggatgtgagatatgggagatgtatgagaattgtgaggaaccataggcacccttatatagctgctggaaaggacccgggtggcgaaaatgatcggggtgggggagcgcggggaaagcatcgcaatcgataaaggccggtccgatgtttttcgctaattgtggggtagcaaaccccctgcctccgtttttggctgtgatgggcacttcctttcgtccggaccgctatcattcgtcgggtgttggaagcgggaaatgaagcaaccccgtcttttggtcctgtgatgaagctctcggtgtgggatacagcggtcccgaatggatcattttttggtaagatcaattatttccagctattcccacctagacaataacacaagtttaacatcttatttgagtaacggcgcatttgcatttattactagtatcatgcttctatatcaaataactttcaatctagcgggctcgtacaaagtgtaaatagttcgcctatcactgatagtcattcacgcaacacaaggcaggtactctattttgtccgcaaccgctcggtccacggctggggcgtccccgttcgataataaacttgataataagctcgtggttcccgaggttgtgtggagactagtcaaatgcaagacatagctctagaagccaaacccaacatcagcgaataatatggcaagtgtatcaacctttgaacgtcattcaaattcagtatctcaatttacaaatcccagaaatccacacctaagtctccactcctatatacagcatattctcagtccataatctgtgcctagagcacaattcaccaatcattatttactccggcatctcaagcacatagcggccggcaatcttgccttgttctgtttcgagttagcttcaagtccaaatagcagtgtgacagtgtgacatacccataagctcgaagatcttggggagatccttcagaggcgccagcttgaatggagccttaatcaagcctcgggcgaagaagtcgagagcttcaacaccgtcctgttgattaccaacgtagcttcccttaatagtgatcatacgaacgacagtactaatcactggggccttgaggaatgcatctgggggcaatccgatggcaacaattgtgcctcgggagcggacatattctgaggcttgttggaaaggcttctccgagacagccaacaagatcacggcatgagcaccaagaccatcgggagttgcggctttcacgtcggcaacaagatccttggacttggtaaagtcgacataagtctgttttcgactttgttagcgtccatagaatgtcagggcatagagattcatgatcatacctctgtgccaagcttctcacacatctctcgcttctcctcgcctccgtcaatggcgactacgcgtagacccatggcctttgcgtactgctgtgcaagtgacccgaggccaccgcctgctccaacaatagcaactgtctggccgggacgaacgccggattccttcaggcctttataaacggtgataccagcgcagagcactggagctgctgcatcaaggggaacgcccttggggatcttagcagcattggcggcctttccgatggcgtattgctggaaggtaccatcgacagtgtatccagaaagttgcgcgtgagcgcacagaggggtatcagattgtctgcagaattcacactcggcacacgagctgttgatccacttaattccagcgtggtcaccgatctcaaaggtgttcacgagttcacccttggccacgaccactccagctccttcgtggccaccgaccaggggcatcttgacagggatgggccagtggcccatcatcgcatggtaatcggtgtggcaaacgccagagtagcgaatcttgaccagaatctgatcaggaccgggcttaggaacggggatctgtttgaggacaagtggccctccgatcttctcggcgacctgcgcccattgtgtctcggggatggacatattgatgagatgaaaaggttggaatgagttataagtgtgtggaagattgattctttggtgaattgaggattgtttgccgggcctcaattggagctttatagctaaacatgtcgggtggggatgtccggggtagtaaaaggcggggcaggacctgtcgcatcgattctcatgtttcctaccatctgaggcaattagaccgggctaccggaatgtgtcaacgatgacagaccacccggaatactgcaacgcgtagactgattgggattcagtgtgtatgatccaagaacttgaaatgcaggagaggcaatgcggggaaggtttgcggggatcgcgcacggcccgccatgcggagccgcacgggtagctactgcgattggatagatgattctcaccgaaatcctttttgtccgtttccaggaagatctcgggatcacaaatgacgtcgggactattctggcccgaaaatatggatatgcagacggtcggtggcaaatatccaagaagcttggtgcttaaccctcaaggcatcgcaagagatacatctaacatcttttgactaaatcaacgccttgcaatattggccattaggtcatcatgaataatattggtataatcatatttcgaaatttcaatgttgtacacgaaaaaaaaaaaaagaggatggcgagggggaaagtcccagaaagggcaaatctccgagaatccaacacacagggcccatctctctttctcttccagtcataaaattagcagaaccaatttgcgtatattttggttgcgctagtcagaaaccatggggttcttcttcgatcccgtggggaaagaatgtgcttgaccagccactgctgatagcaaatccggaatatggttcctcttttgcatacatatgtatctttgccaagctggttccgaagctgtcatccagagcgaggcatggcgtccccacttcactatcttcagatacgctggatgacctctctgacgacgtcgagtatgccgcatctgagaagaagggcatgaaattgtcatttcctttaaagatagttccgccacaagcttgatttccgaatttgaaactcgattgttcgtcgaaaaaggttgagtcaatgacttcatcaaagacttcttcaaatgggtcgcttctgttgtctgggatatgtctctcatcgttggcttgttgtctagttatctcgttgctataccccatattaataaggatgcaatagtgctgaagtaaagccagactgactcatagcttgtagtattcaagatattctctttttgatgctgggtttgctgcagggaagtaacaccgcgacacgagctagccttggatgctttcttcgtacctccattgaggtatttaggtggttttcgatgtccatcaacacattgtgacggcatcttgcgcttcacgcattgcccacaagggcgttcatttcctaccgcctttgtcagtttattcttctcaaactacccttgttcgagaccacaaggcggggtatccctgagcttaccgcatgttttatgggccttttggcaatacaagcaggatcttctagcctttctgcgggggcgcgggagctcgaattcagtgcgaggtgccatgttcagactagtcatcttcaatttgtgtagtgtgggatcttcaaggaaggtagataagatagtgtcacgtttgtcgatgcgacgaacttggaatcaggctttatatatacctagataaaaggttcttcacgaaggttactaacaccaagggtcctcgcaatatatggccaccaaggtgtttatcaagactacgttcatcgactgccataacaaatttgaaacgtcattctgagcggctccgcatgtttggccatcctacaacatagttctcacaatggtttagctcccttcaccagatgggaatatcggggccgtccttcagtccaaaataatgcggggaaaatcagcaagaaatgcgccgatcgtaatttcagctgtgcggctccgcatggccatttcggaaccgcatggccccgaactcaacgcgtcaaggcttggcaattggcgatgatttcccagtttcaaatccaccaacatactttttggatcatctgatctgcattccccgcaaaaagactagcaaactccttgtcatatttgtggggtcaacccccggacggaagagtttatttggcacagagtttatgtggcaacttggattcagcgaaggtagcgatcatcaaagttaaaaacctggggacatagcacatcgatacacaacattggttgaccccctgtctattttcaccggttattgtgctcactccccgttctggactcatccggtcttgctgaaaatcgagacatcccacattaaccgtctgattggacgcggtggaaaggaatgtgactgtactctccactccccctgttttacagtgaaatgagtgaatatcaattaccccgtggtgcacgtcagctacaaagtccggggaaaggttaaaggttccacagtccccgcaaattaataacaacgaggcttatctttcagagcttccattctcattacctgctatagtatattcttctactctttgaagaaaccagagagagccatgtcacatcccagcgagaacagaatggacagcttcgccagtcaaaatggcgagtcgaaggccactttccaaaacagggagaacacacaaaatgctctcactacagtcccaacgtcagtgactctgtcagcggaacaatttgaaaggctttatttgagtcctatgacggttcgccaatcatcgctagcgaagaaggttggaaatccgacaccattgtgagtctctgaatactatattctacgcacggcaattttgtctgacttgattgaacatgcagagcactaggaggttttgtcattaccaccacacccgtttcatgctgcttgatgggctggagaggagccagtggaaatggagttgctttcatgtgagaaaaccaatggatcgagagagccccatctaatgaactgaacagtggacctatcattttccttggtggtctgttgttgcttatcacgagtattcttgagttcatcatcggaaacacattcccctgtgttgtgtttggcactattggtaagtcttcctatctcatgatacaagcctcgctcactagtccatgttgctgatacttcaccaaggcgggttttggtttgcgtttgcagccacgatgattccagctttcaatgcagccggtcagtttgttcagatatatcattctaccctcatgatatgagtttgctcacacttcatagctccctactcctcgtcgaccaccgatacagctgccgggctagccagcgaaagctttatgaatacctatggtaagggcaaccaagactctcaaatttgaggaatagctctgacgaaaccagcattcctattcataactatggccgttttgatgttcatcttcatgatttgtgcaacacgtatcaatgtggtatacactctcattttcctctcactgctcatggttttccttctgctgtccgcggcctattggcaactaggccaagggaatgcatctgttggtgatcggtgtgtaaaagtgagtatcattctcattatttctctgctattttgactggattctaacccgatctttctcccagggtgctggagcttcgctctttgttgctagtttactcggcttttacctgttgattgttcaactgtttgggtccatagggttcccatgcgttttgccggttggagacttggcagtactttggacccgcaatgaagacaagtgagtctcctaaaaacaatcgaatagttcgttctgacataatacaagagagcgagaggatgttgaacagccaaacgctcgctagagtcgaatcttttacggtttatctaatgttgcttgctggtatgggaagccggctgtgtcggctggctgtctcggatgtgcaagatagcttcaaccttgaaagttcttgaatcagtcagctctatcagccgcagctgttttttgtttcctttgatctcaccaggtaatattttgcgaggcgtaagtgaggcattgttaaaagtcggaggggggtgccgagtcagcttcccaaccctgcgcagattgacttgcgcatacatgtgactacttatcatatatcttagcttgtaaatctaattggtaaaatttttcgtgcattaagaaaaagcagagtactcaaataaaaggatattccgcagatgctccctcgatcagaagcaataccgttgtagtaactcacctcctttcaatcccgataatttcctatttaggaagtgtgaataacctcactatggctacttgctgtcgccgtgaaacctgccgagggagaagggcatgtctcttcataattccgcagggatgttacttggagccaaaactacaatccggtggtgcctgaaaactatatttgccactatttttgcctacaagttaagactcggttctaacatctccgtacaccttgttactccgtacatgtaactatgagccccatgcgggcccatcagtccccacatcgtagatgagtcttcatgactcatccagtcccgcccccggggcctccacaccaatcgacatatagatctcgtcttccagggatcaattaacagcccaaaacaagcttggaaactccaatccgattcccttagtgtaatacactccaaccccttgaactccaattcctcgtgaaaattctgggcgccgtgacactcacaacctcaacctcaaccatgtcaccccccacggcttcaatgaccttctatgacatcgctctagcacctcctgtcacaaaatcctcctgctccccaaatccctggaaaagccgctacgccctgaacttcaaaaatgtcccctacaaaacaacctgggtacccctactcgccatcagctccgtccgcggcgctctcaacatccccgcctcgcgcaaattcgtcgacggatccccctatcaaaccctacctgttctctccgacccagctaccgggcgcacagtgggcgactccttagagatcgcgatatacctacaggaacaatacccgtcgtcgggggcgggagacttattcccggcgcaggcactggagttcgtctttgggcgggatttgggactttacgcgccgattgcagaggcgcaggtcgcggaggggcctgctgctgcgtacgcgaagtttaatacgaatgtcgatgctgtgtttagtgcgcatgcacgcctgatggcgcttggcatgccttttgatcccgctgttgcggaggagtgcaaggctatgttctcaaagaggatgggtgtgccgtgggaggccttggcgcttggtggggaggagagggaggagttgttgaggtcgtttgaggagactttgggtggacttgcgaagttgtatacgaatgatgcgagtgggccgttcctgatggggggcaaggcaaactatgcggatttcattgttggggggtggttgcgcatgagtcggggtatgttgccggttgaggagtgggaagcgttgaagggatggcatggcggtgtattcggaaggttacatgaggcgctggaagtgtttgcgcagatggactagatctggataaatggctgggtggtggatgatggatggcgttgtatactacgtattcggcccgatgcacggtttcagaaccttcataattatatacatatacatgagatatctgatagtatgtatggagtactccgtagtggtagttgagatgttgcccagacatgtgttaggcaaattctcacgtgatgtatcatgtgacatagggggttacataagactatttaattgggcgccaaaggataaggacaaacatagcgtctattgctcattgcagcggtatatatcaggccgtaacattcgttagagtaacattccctaggggccacactagaagtggtttcagcaccgaaaaacgaacggaaaagtgttccttgacgcgatctttggtctttaatccatttggccacgaagcctcctttttgtgctaccatggatcgcagaatatcaccatcagacttgaccgactcaaaccgtctcgtggaagataccatgatccatgtatttcgtgtggataacacgacggtagtaaaattatgcgacccaagtcgcctcgccgaggcagaagccatgaggttcatccgctctaaaacttccattccggttccagaggtttataacgcttatgtcgatgaaaccattggccgtggggtcattgttatggagtacattgaaggggaggttcttcgcgatgttattgaggatatggatgacacacggcgccaaaagattatctcggaattgcaaaagttcatgtccgagctacgatcaattgaaggcaattttatcggctctattgatggctcagcttgtgaggatcctgtcttttgtgccgaacagggtgggtttggcccatataaaacggagaacgaattcaatgaggggttagtccgggcaatgaccatcaaccagacgacgaactcctggattaagtatgttgcaaaactcattcgagccatgccatctcatacaacagtgctcacccacgcggacttttctccgcgaaacatcattatcagtggtgagcgggttgttggaatactcgattgggagatggccggattttatcctgagtactgggaatatatcaaggctatgtatcacccggactggcaaagtcgttggatcgaggatgacattgtggacactgtactgaaaccattttatctcgagcatgctgtcatgttacatatgcaacaggttgtctggtgacgacttctcaaaactcgcttcaagatttagtctatctaccgacaaagaaaattgggaatattttgattgttggtaaatcccgaatgtaagtaaatgcatatctcagtcagaaacaatatatctcgcagagtcagagtagaaacagaacctcactaaaagcaaaaggaaaacgagtaaaaatgaacggaaatatgtaatcaattaccgaaaagaatagattttgaaagtgaaaagagcaaaaaccaaaagtcctattttagttgcatggctcgtatggagtaaattttcctgcatggaatgcgaaacgttccaaccttccaaggatgtgagacttggtagagccgcaaccgtggacccacccatggatgggcggcggctcgggagattagctcatccaaaatagccgctagggccacagagagccggcggaccgtgcttagtgttcttcgcgtaatggtaattcaggtattaaatccccaccgcccgggcccaccagggcttggacctccccttgttaattgaatacataactattgagcgccgtgtggtcttccatatttctccttgtcaatataagcttaatgtctcgaaaaccgtatcccaccccattggttgtccagccactgagtggagagcacacacatactatcatctcgcttcatggaagaggcagtaacgctgagcgttttggtcgtgagctccttgtgtcggcaaacctacaaggccgacttcctacagtaaaatttgtctttcccactgcccgcaagcggcggtcaactatactcaagaagatcccaattcatcagtggtacgataactactcccttgaagaccctggacaaagaaccgaccttcaggtggatgggctctctcagactgctgagttcattcgcggcttagtcaccgaagaggtacggattttaggcgaggcgaatcattcaaagattatcctatgggggctgagccaaggctgtgctgcgggtatcttcgcgcttttaggtggctggcccgacactagtgaaggaaatacactcggggcatttattgggatgagtggatggctgccatttgagcagcaactatgcgagattatccgatccgacatcaacctagtattggcggaagacaattatcaggagatgcaatcggaagacgactcatccgaggaatgtgaaagtgatgaagagttagaagcagatgtatattccgaacaagacttcagcgacaatccattggacgagagcagcccggtacacgatgactccaatcccttcaaggggctcaaggaagacagcccactgtgtggtgacttcaatccattcgaggaggacgaggaagaagctccgttggtcatccaggctatcaaccacgttcgtgacatccttgctcttcctatgattccaaacaatactcagtcatcggaagacggtgattcaacaagtttgtgtcacctccacactcctgtctttctgggccacggcgcacaagatcctaaagtctctgcgcgttttggtgaaaagatgtctcgtatgctgtcagatagtctaggaatggatgtgacatggaaggaatatcaagggctagggcattggtaccgtgttgaggacgagattgaagatattttgggctttcttcgggatcgtgtcaacctaccagtgataccagagtcacccctagagaaacagaaaggacaggagaagcaattatgagttctttgaattagatacgccaggcgacggattttaaaccgatgattaagtattccgtaaaaaccctcgtactaggttcggaaaggacatgtgctcagaagaagtctgatgctcagtcaaagatcagctctagatacagaccaaattgagccaaagagagaaaccaaaggagtgggagaggagggaactatgatatagcctgaaaaagatcgtaatttctgtattgctgagagacagatgagagtcctttaaactattcaaagcaccaaactccaaactcccctatttactaagatactaattatcataatcactatgctgagagttcttccaatttctcagctatctgctcaacgtcaaggtcacttggccttatttcaatggcctgaacttcaaccttgttgtcctctgacttggagatatctttctctccctccttctccttcgcgatgtctatatgggacagcgtatactcatctggatcccaagccagaactttgctttccatctctttaaccttttttgctacaagtagttctatctcatctttctccgtgtcacttaagagatcaagtctctgcctccacgcatcctcgacattgtccgccggtccaaagaagcgctgatcaatcttttcccaatatatcacatcgatggcacgggtggtcctcgcggcatatgcaatccaaaagtcaccactctcccaactttctcgcattggaccgagagtcgatcttcttctttcgtagccgtagcgttctcacgatcgatcatcaccttcaaaaatgtctggagccggcgatcgaacacgtttgttcagtcctcaagaccttgaggccagtgctccggtgtttcaataagaagccaccaaggcggcgcgtacgtgaactcccaatccacgacgccggtcactttagagtcattgttgacaagaacattagttggtcggaaatcatcacaccatattttgaacgggcctgtatcgaatgctacccatcgcttggtgagcttaccctcgcgggctagcttgcggaagaggtatctgccaatgaacttgcgtcgacgatcatctgcagactcgattgcgtcgtttctttgatggatgagattggcaatgtgaagttccgccagggcttcgaagtacgaagatgctgaggtaaatattgtctcgtagcttggtaattctgactgaggtagggaccctggtctaacgagttcgtttgaattcattgataaaggaaggctcgccacttcccatgtaaagtcgtcaacccgactcaatgatccgatccgagggaagtgtacttttgaaagttacaacagaatgccagctagctccccgtataatgcctgaagtgtgtcctcattgatatcggggttaagccttccccttttctcaggtgggtaatttgggatattgagaaggtcgtacatattcgtgtcatgttcgacatattccatggtaatgaaagggcccaactccaagggagactctttcttagaaccgcagtggagaatgaatggcaccgggattgaagtcgcatcatgaaggtatcgcataatgacaacctcgttccgaacctgttcttcgggaaacatagccgcaccgggtaggggaaagcgtatggtggcggcaacacctgttttgtacgacctccagaatgcgatattgtatgtaccctttcccaagagagaaaatcgaaaagggtcggttcagcgtgatatgatgatttccaatggaatgaaagacctgcttagctccttccataacatgtatgtgacggaagatatgatggttccttttctttgtcctgcagatcagcatgcagttcattatgagcagctttggtcgactttgccctctatcgagcaacctaacctcggatggaaacaggtgcatgtactacctgacactgggacaaacgtttgaagaagctattgatgtcgattgtgcgcctaaatctgtatggcgctggggttatgccatatttgatgacgaaagattgagggcatggaaagcggtttgggccacgagcccgaatttgcagtttcaattattcattttgttgtttgaatgttgactagaggtagttcatttatagtccaataccatctcatgctctaaattaagataccatcatataggctgcgtcatttagctatgagttgaacgtatcgatcagaggattcgacgtaggagccacatcatcctgcgtggcttggactattaaaagtctgaaagaaagttatagaaattataaaagcagatatgatgatcaagggataaagaggcacagctagagaagcactaggtaaggataagcaggtgtgaacaaaggaatccgaatccttggatatatacctgcgcaatatttgaatacaaagaattctcgaaaggaagtatgagttgaagagaatggcctcgctacatgaaacgactctgttcagaaattgcgggctttgatgctgctattcttgttgtcaatgaagcaattcccaatctattattggaacacgttcattgaaaacaaaaaccaccaatacctttcaccagactcattattggcattcaactcttgcttctacatcaatggtatgtggcatgtaaaaagaatcatattcgacaagcaagtccctcataatacctggcttcactcagcatatttcgcatcactcgacttcgacattaatccgccaccaattccaaataaagctacttttattttttgacgctataatctacatctacggagaatttcctgacagcgtctaacagcggtgattatggatcatctttcacggctttccaaacgcattcggggaatcgccaaggcagttgtttcgttctcatcatcaatcgtggatcatatcacactgaagcgacggtgtgaaaatgaagattctgatgaaggggatgatgatgattcggattccatcgacattgatccattcgaagcagtattggaaagagtgaaagcgaagcgtattcgtgaatacgtgacaacgattcgcgcgaagactctttcaaacgataagaagaaaattcctaacgttgaggttaagtctcctactttcataggggagcacatttgctatagggtgaagtttgccgacggagttagctggattctcaaagtcccagctatcggaacccctgatcaatttgacaaagacgatgccgagacccttcgctcggaagcattgacgatgatcatgctgcggcgcgagacaaccataccaatccccgaggtcatttcatacaacattacatgctcaaacaagctcaaagttcccttcattctcatggagttcatcgacgctcggcctttggacgaagtctggcatgaccgggaatctccgaaagaagttgtacaggctcggcgtacacgctgtctgcgggatatttctgcagcgtatatccagcttggaaaatacactttcaacgaagataggcccctgcgatttgacgacgaagattgccttataggtgttgtacccgtgaacaacgacccattctcgggcctcagagagggttgtacttctcgtctggacagatgggggaacgaggaggttgagcatcgaaaggggttgcagaagcttcttcggatgtttgtcgactggactccagagccaaatggtgggaaatcattcgttttgtcacatccaaaccccaatattttcaacttccttgtctcggaagatggttctgtgcgggcaatcctcgattggcacggcgcgcataccagttcgccgagtatagggaatgagtcgtatccactatggctgatgcgcgactgggacccgagcgtatatatatggagtgaagagatggaacaggggattcatgacgaggaaaatgtttgggaagactcaccggacacactgaagttctatcaaaatgtctatgcgcaatgtatcgcagatctgcgaccagaaagcgagaatgccaaagtgacccgaaattccgttctctttcaacatttgatgatggcgacgggagacccgatgtttagcttaggcattaccgaaaagatccttctcgaagtcatgaagcgagtggataagaatagcaacaacaaagacagcggaaactcgggttcttccaaagagcatttgacgggcgatcacagttcaccgaatgagacagaggacgcgggccatggtggtattgaagcggacatggatggagaagatgaagacgaattttttgatatttatgaatttctccagggtttgagcaaagacggcctatgtgagcaccgacagaagcttttcaagaaggggtttcaggctttatttattagttagcttcgaggttgcggtgtttgatgtatagttatgcacgatgacttcaaagaccgaagttgtcatgcattattgttgattttgatgttgaaaaggaggacaatttgaaatcagataaactctttttctttcctttgttcctagacactcttgtctcttctctagagtctagttgcacccaaaatgatatgcggttggtacaagagacacctcaggcaggaactggttatccagccacattatgtaatcaagcacgtcagccaatgaaaacatgcacactaaccgatcaagggcttagggctcacctcagtcacaccccactgccttttcgcacttgagcggcttctggacgtcgccctcttcctttgaacatccacctcatccgacaaaatggtgagttccccagcatcccaatatacaactcggaagacagaatactaatcgaaatgtgacgaacaggcgcccgcagcaacaggaggcaagaagcaaaagaagaagtggtccaagggcaagggtacgcaatcaccaaccatgcgatcgtgacgatttcggccgagttcccacaagacacgaacgaaatcgttggacgagctggggatacgcaatagcaccaagaagcaacatttactgacatgtctttcgccctacagtcaaggacaaggcccagcacgccgtcgttctcgacaaggccaccaacgacaagcttcagaaggatgtccagtcctaccgtctgatcactgtcgccacccttgtcgatcgtctcaagatcaacggcagccttgcccgccaggctctcgccgaccttgaggctaacggccagatcaagaaggtcgttggtcactccagcctgagcatctacagtacgttattcaacaccccttatccttcgaaattccaatgctgataaccttcttcaatagcccgtgccgtcaccgccgagtaaacgtctcgtctctcgtcttttctcgcggttttcttttccttgctacgaatgatatcatttaccttgggaagcccggctgggcatgatgcatagtggattaacgtctgactcttgaagggtgtggaacattcgcactcctgatatacgtcagtagtgcgaactgaatcaaaaaatctacaaaacttcatgaaaaggacatgcgtcatattccgtagacttctctcggcctctaccacctacaatttgcactatctacaccgacccagcaaaaacagtaatcctacgactcttccaccatcgcactcctcttcggtcgctgctgctgcgcgctctcacacagcggcaacggctcttcatcaacacctccatcctcaaccaccctcccagcctcaaaatactttgcatgattcgcaaagaatccagtccaccgcttgacagtctcctcaacccgcgctctagcagcccgtaactccttctcacgacggattttcctctgtgcagaagtcacagcctcattctcgacatcctcaaccggcatgaacataatctcgacaccgcgcaagtcgttcgtaagatcttccttaaagcagcccgtgacaaaagctcgcgttgcgtcccgccccgcaaagaagttgtagctcccaccgggtccgtagatcatgcgattttccgagacgtcgaagacggtcccgttcaccgcgacgtacagggggagactggtgtccgtgccgttgtagagggatagttggcttggtgtcaggataacggggccttgctttattgtagaaatggatgtgttagcttgaatcaacatgaccttttcatttttttgtaaaccaaggaccgggattcgcgtaccacccactgcttcaccaccggccaccgtgtataccatggcctgtacccccacagcacggactcggaggaagtcacataatatgagagaccaccgcaggcgacgagtagggtcacaatcacgcggagtatgtctagcaggcttatgccgtggtcttggctggcttcgtcgtttatggagtgctgtccggaggtcggctctttgtcgggcccattgctggactttgacgtggctgttggtcgctggcggagttctgtcatctctcctgaatttgagttgagttgtaagatcagacaatgaccatttggattgttgtcattggagttgcacaggtggagggcttggctgacaaaacccgaggcaagtgcccagctccgagtggacttcgacttatccacaacttcacatttacaggatttggtttgattttgatcgaatatgttttatttcgcaagctgcattcgtcgctaaagatacaagaggcttgaattcatcacgcaacggagaattacacccagctttttggttcgaacgtcaagtttgcctcgatttatttcccgtcatttgcttacagctgcagattccccttcttgggccgtagacccttcttcccagctacgcgagaagacttcgttcagagcgtcttggaaagtacggcagttcatgtcaatcagacctcgcttgtccttggcttcgggattgcgaatcaccgagactagacagaggtatctgtagaatcaagtcagtatagacaataaagatacactttgagagacatacttgttcatctccatcaaatggatcatagtctgatcatgcaacaccacatggctttctgcttcttggatctggtcgcccaatcgtttacgaactgggtgatcccaagagtacaactctgagatgtcgacaatcacgtcaatataatcagagcacatctcatagcaagccatgtcaacaggtcgagtgtcggaggcgatataaatcttactcagaacatcgaagaggtatgtcttttcaaacccacaattgttggcgagggtgttgatgaggttctcaagtgtagataagttggggatcagcttctggatcactttgctgaaggcttcgaagactgagtaatcgtagatagaggtcaggtagtagtgcacgggcgcattctcgtatccagcgtcactgagctcatcggagatgcgctgcacaatgtcctggaacgtgtcggtgcggtactcgtctgacagtccatcgaccttgtgtatgaagacctcgatgttgatcccgggatagaactgctgaacggtcaatatggttcggttgagccgtgccactgagtccaggtagtcatcttgtgcgtcgatcacccaaaccagggcgcccagactgccgaagatatcttcgaggtcaaaagcggactcaaagtattcgagctgacctgggaaatcccagacttggaagtccatgaaagagctgcaaactccaggtcagcggaaagcgcatcaagcacgtctattctttcgaacttactggatcgagtccttctgaatccgggtagtcgactccaagaagagtgtctcatttggcggcatcttatggaataccacactagcaatagatgacttaccactcctagtacacagttagtatctcagttgtgcgagggctagcagagaagacttgccgtcggagtcccattagaagaagacgaggtttaacatcagggcctttggtattaggcacagaggccgatttggcctgagttggcgcagccacttgtctgcttccctgtaaaatatccagaaggcttagctcagcttcagtcttgggcaatggaatttcacgccgtcgcttccaaaaattgagctcacgtcctataaaaggaccatgaggccggctcacgcgggctgccggtgagtcggacatttaatcaaacaaaaggggtatacattttgggagaatggggaagcaagagaaagcttatggttatagggacgggagattcatgattaggggcagggtggaataaatcaacgcatcacatgttggaaaggaaaagggcattgggcagtcagcgaacccaaccaggctagtatccttggaataacaaggaaaagcccgaggctgaggacggagacaaaatgggactatcttgcaacgggcccattataacaggaaccgtgacagacgctccaaatttggaaatccgtgccttgcctttttcagggcacatttggccgcctagacaggtctctagtgattcttccggaaatagcccaagggtccgggaccaagcagctgtctcacaacggcccgtgcatggatgcagcgggacgcggtaactagccgagcttcgccggatgacctagccggggttcgatgtattatagggaatatggtgcgaggggatgtgctttgggggaaagagtttcttacctccattgaagacagatatctggatatggtatgttagaatctgggatatgcattcagaattgattgggtgtacttacggcgcaatttatttgtattgtgcagggataattagaccaacacaaggtcaaatgtcctccgtgatcacaaagaagaatggtaaaagggactagtcgagctcaatttaaggcaaagaccgactgttgacatctgcatgtgcgaatctcgcctgggaatgccgcaaggatcccagttattgactgggatggtggtacggagtcggatatctgcagtcagacctgtatcatcttcccaaggttgggaaattcaattcacggcgggagggtcggctggagcaatcgtcgagtaaccgttatgccgtttgaggagtgcgggggttggagtagctcggagctccgaggcaaggcgtagcgcgatctggcaccgacgtgcaacactcaaaccagcgcggtaggggagctaaaagagtttattttggaaaatgtaaggcttgaattgattcaaaggagtactcatgagattgtgttaaggaagagatgggggaagaggaagagcagaaccgacattcaagacggatcgttatctctgagcttctatcttatcagttctaatctgtcacagaccgcctttactattctgccacatgccacaatcaacttcataactgtcaaagaaaggtacagagtacacgcctctaacctcatttattacgcttggtcaaggctaaaaatgatgggcttcttcgacatgatattttatgcttaaatacattgatagaattgaacagaaatcactttttttatcatcaacaatcatcaacctcgacatcatgcggcaaccatccggtggttgtgtccatgagcatgtttagtcccttttttctgacccagatactcgctgatacgatgcttgccctgctccggctcctgctcttcttcttcctcttcctcttcctcgacctcaaatgcaggccattcctcccaaccatcttcccacatctttgctaacttatctgttttctcgtctctgctcattttcttgttcttcatcaccttctcccacttcttcatatctttatcatctagaagacactcatccagcagagcagtgatcttgccagtgtcaataccttcaccaatgaacactatttcctggcgacggtcgccccaggcaccttggaaatcattttggatggattcccgcacatccttgtcttctggccaagcctcatcggggagttcagcaaaccaaggcccaccgcatccaagagtcagcataccacctgcttggctccattctccaaattgccagggtctggttgtgagccagaagaagcccttggagcggagaactggaccaaaggccgggtggttacgcttattgctcataatgaccgctggatcaggctggtcaaagtcttccactgacccggagtcggagtctgtatccattgcatcttcttcctcttcttcttcgtcttcctccccgtcttcctcgtcgccttcttcttcttcaacttcattgttctggagaatgatgaacttgtcatggagaagagcaaagaggcggcgtgaatggaagggtcgacgggcagtgtagacgaagttgttgataccgtacctgtaatcgatcagtaaatgattcatgaataaagaactgacaaacttactccaaggtctctggctttggtgccaaccgctcaccattgcctgttgtctgtatcgtcatttcgtgcagactctgcagccacccaggaccagaagcagcacgcacgaaatcaaatttgtttgtgttgataatttcccggacgtctatttgggagtagtttgactcgaggatctttgcgactgggttcagcagcttgagcaaatgcatgagcttatcgcgggttgcttggtcaactgtctcgaccttattgagaatcaacacatcggcgaactcaatttgatccaccatcagatcagatatagtgcgctcatcctcggggacaatctcttccctcccatagcggtcagagaggaactctgctgtgtcgaagctggaaagcaagttgaaggcatcaataacagtgacggtagtgtctaaccgagccattgtgtgcaagccacctaggttcacactatgttgtcaaaacatgtcagcaagcccatcataagcggagatgtggtgaagaaacaatacatttcatccaggatcttccttgcttcctcatcatcattcgcaatctgatcttcagcttccaacatggccgagctaaactccgacgtgaaagtctcagccacttgcataggctcgctaatgccagtcgactcaatgatgacatagtcaacctcatttcgcttggtcagagctgccagttcagccagcaagtctccccgcagagtgcagcagatgcatccgttttgaagtcgaataagcttctcggtggtttgtgagactttgtggttttggatgagggtagcgtcgatgttcagcctaatggaacgaagcaattagcttgcatcctatattcttcgttcgatgtggaactcactggctcatgtcgttgacgatgacagcgatccttaacccatggtcaggagacttgaggatgtgtttgaggagtgtcgtcttgccgcttccctacacatggatgtcagtgtccatggacatgagtcaacgttcatacaactgctgtttcataccaggaatcccgaaagcaaggtcacgggcatctgccgtgtcttcggcttttcctccagaggagctgggacattgtaggagaccgagtctgttccagaattgatgaccatcgtgaaggtgagtgacttttatggctatgtatacaaagcaagaaagaagaaagagaaggaaaaatcaactgagtctctggaagttctatggtatcacattatatagcatctcctttcccacggcaccgtctccaagttcctcaccctctcccactgtcggttgcattttcgatgtcgtacaattgtcaatacatgtcctccaaggttgaagtataccagtggagctatctctcaaccaatgaagcgtatgatttcaaatggcgatgataattgctgtgttttaagtggccagcataaatcgcccgcaaggtacctggctggcgccgctgactttcacggtccccatttgacgagattcgttttgaaaagacagtattagggcatctgtgattggtcttttgctggtttctgggctgagtgctcgttttgaactatcgatggtggatgtacggagtagggctaaacgagctaactaggatagagctagaacgacatatttgaatctctaactagcccaaataaaaggatattgacagtataaagcttgaatgttcttcccccatatgattcttaatatcaattaatgcttcagatataacacactcagatctccaaccttctccaaatcgaaatcggcgatcggctcaatgcgcgggccgataacagccaaatcgccgatctgagaatgcgaaattgacgtcgaagaacgtataaaaggagagtcacaccgacagaatggaaaataacattcattatctctattcctcctctccaaaatgaccgacctgggaatctacaccaaacccctagcctacctaggcctcttcaccctaggaaaagccgccttctccctaacccgccaagcaacaaacttcctcctccccagcacgctctgcaaacgctacaactccacaaaagcaaactgggccctcgtcaccggcgccacagacgggatagggtttggcttcagtcaggagctctgcgcgcgcggcttcaacgtcatcctacacggccggaacgtggagaaactcgaccgtcgccgccgcgaactacaggcgctgttccccgcagtctctgttgctgttctcgtgcgcgatgcgcagaatctgactcccgatattgacgatgttgacgcggaggtgcgcgagatcattcatagcagtaatgcggcgatcggttccccgggtgaccctggcaagttgaccgttcttattaataatgtcggtggtgagatgagaccatctacgctccttaaggagtatacctttgaggatgtgcaggcgaccgtttcgcggaatgcgaccttcgctattcagattacccgtgtgctggcggaacagctggaagagaatgcgccaggtcttgttatgaatgtttcttctgttgcggcgtttggattgccgtatatcagtgcttatagctctacgaagggatttgtggattcctttacgaagtcgctgcgcgcggagttcgccgctgaagggaaggaggttgaggttatggggctgcgggttgccgaggtcaaaactgctgggtatgatgtgaagagtagcttgtttgtccctgaggcgagagtgctggcggctgctggcttggatcgggttgggtgtgggcaagagattgtatgggcctatttctggcattggttgcagggtttgtcgtttgagtatttaccgcgctggatgttgatgaagattgctgcgatgaagctgaaggcaatcagagctgatcagggggccaaggcgaagagcagctgatatggtagctgatatgttgtgcctctggctctctacttcctttctatcacaaacatattgaacagtataagatacacgggaaaatattatatctgtaatcaaacacaacagcaactacagtctatagaatgtctagaagccagccggggccttatgacgatcgtctggaccgtggagtcctgcgccaaggtccaccatgcactcgctttgccaatcctttggtgtgaacttatcgacaattgccttgaaggcgtccaaagtgcagaatgtctcatcgccaggcaagtggttctcaggcttagcagcacagccggggataaggacgggctggtcattgtagcgaatacggacatagtgcttctggagagactcgcgagcgctttcggggagggattcgagaggtgcgcgtgcagtatcggagggggtgggtagcttcggtgcggacttaccgagcaactgggaaaggataccaggcttcttgtttgcgacgggtgggttggagaactcctcgagcacgatgccagcgatggaatcggagctgggcgcttgggagaagagctcgactgcaacagaggaagtgaatggaggccatgactgattttggaatccgccaatactggacaggatggctgccaaggtggtgtcgtggcagccgctcatagcaaacttgatagccttgccagtttccgccttgcctgacccggacgcagcggactcactgcgccagccacctttcacagcggtgctgaccatgcggtcaaccacatcacccatgagagcaccaattcccagtttgcggtattcgctgctctcgccgtagccagcaaaccactcctcaaccgcaatgcggtccacgacggcacgagccttcttgtcgtagaactcggatgggagcttagtggccgggccatgggcatcggttgcgttgatggtatccatgattccggaaagacgagggtgggcatcgacagcaaccttaggcgattcttcgggcatatactttgaccaaaggctgttcaagtacgccatttgttccgagtcgttccctgcattcaaatcattagccgtgatccttatcttcatatcccactgataaacccatacatcgtgtagccgcgcggtcagcaaacagccgtgacagctgtcggaatcgcctacaattcccctcgttcgggaagagtgtctcctcattgacctgacgggccacaatcactggcggtgggaagtcaagcgtgcgcgcgctagccgggtacattccccaaaaggcctcttggagcgactccagcgcacgggggatcggcgtggcgcgcagatacatatcctcggaatcggccttgatctgaggcataaacccgagctggtccacgtataaacgacgcagccgttgtccgagcgcatatgtcgtttcacggcccttgtctgtgagctcgccgtgcaagcttcagatcggacaatttagctttactccacatacagatcatagctccaggaacttaccacatggcttcgacgggtcctcccggtcctgcagtaatcaccgactggtcatttctgccgaatgactccattttccggcgccattggaacccattccattccgagaggtctttgctgctcgatgccatctgcaccatgcgtcttgcgacaccacaatatggccagtcttgtcggggtaactgtcagcatgtactccgccgatatcggtattaggaaattagcatacatgggcttaggcctgtctttgggaagtgttagcggagaccgtcggagagcggatttggggtagtcaattgcggcatacgtttgagaatcgagacgagacaggtgtccgttcacctaggatcggttagaaatgctctcaggggtaacattgtaaatgtatatctcaccatgacggaggaactgtagtagttagctatgtttgtcaatgtggggaccaaaacacgtaccacttgcaccagctgcagcttcagggctggtgggtacaggcgagcgagctcatcctgagtataaggctcacgaggaatgagggtggtcatctcgaatcaagtggaagagagatatccagagagatctaagaatctataaaataaatttaagtcaggaaataaacggcccccaatgaaggcggtgagggagcagctgttggagtaggctataccgataagccatccatgttgacgttcattgaattatactctgtgcatttattaaatagaaaatagaagcattaagtgcggagatttattctaattatattcatcagcctctaaacatggggaaggctaggaaaagctggcaagctcctaaggatataagacccgacatatggtctccgcatctcggcaagttcgccgaagcgtactcgcctcggactagtaatctccgaggtgaagaaaagaagaaaactcttccaagctatgcatatttgacatggtataaaagtacatttaggaacaacattcctcgtggtcactcgtctcccacccctcctcgctttcactggcactccagacagatcgagtgggcaccgccgggacatcgctagtctcagtcaatgcagccgcagctgccgcagccgtagcagtagccatttgcttagccaacttcttattattcttcgccttgcgggcattctcctcttcctggcgcatcagtttcacgcgctcggattcctcgttcgccgctcgctccaagagctcgaccagcttctccaacgctggcgcatatgcctgcgcaagggcgaagtccccgaccttgatacgcatgaagtccatcgctcccgcgacggggccggtatagacgccgagcctttggcttgatgtcgtcatgttgatgtcgtcggacattggggcgtcgttgcccgctgattcatcctgggggtcgtcgaggggaatatccgcatctgcgggctcctttgcagctgcatcccggttattcgggaatttgcctggattttgcttctctacaaacgctatcttctggtagcgttggctgaaatgagtgagcaggacagcgcgcgcttgcatgcggcggccaatttcgattgcctcggaggaggtcgagtgccgtttggccctagccgatccgaccatgtcgggttggaaggtggcctcatggataagcacggtcgaaccctgtccaatggcggcaaatttatctgatggcctgcagtcaccggagtaggaaaccttaaatccatttgagaagacaagggagacggcgagcgcacccttgcagtgtttgacacggcaagtgagtatgtctgcaaggccggtggcagacttgagaagaggagtgatgggggaggattcgtccgtgaaatcaacatgaagacgatgacgattaggtagttggtgtgagaactcggtggtgattttagaaccttgtacttcgggatgcgcggaaagagtaagcaacttgtcgaacccgaagttctcgacctgtgagtattcttccaaccaggatatcattgcatcatcagacacaagtgccagccgtttctcctggaggatcttggctatatcgttttcacgtctagcagccgagccaaatccatccttgaagttctctgcgtgccaggccttgatcacagagaccgttcctaggtggtgatcagcgtgcaagtggctgatccaaatcattcgcaggttctgaagcacttcacgaagttcttcgggctcgaaaactcgcttcagttgaccaagagtattctcaccacagtcaagcagatagtagccatatccaggcacctttagcagtgtggcagagacatttcggtatttagatggaacagaagaaccagtacccagggcgatgatttctgcatccgctccaggccattgtgtccgttgttcgtgcaactttttctggaaagcaggtttagccacgcggctgctaatgacttccattctttgtgtgacagaacgcgggatgctattcaatacattcgctgggttgaagcgggtcatcacatcctcactgttgaacccgaaattgggctccatgttgatgatgaatccgggttcaagaggctgcagtggagaattctggcgagcagcaattgcagattgtgaattggcattaggtgagcccggttggggaagggtcacattgtcgtgaacaggaaccgcatagctatcgcttttcagacgggcgaggcgaacagtcgagctagcagagcaggtcaatgccaggtagttcgggcagtggtctgtgctcgacacggtgtgcttgcagtgggacatgctggcaacgaattcctggaatttaggattctcagccacgcctggtccaagaatccagatgaaggcctgcaactcggtcgtcacggctggtgatttccattcgggccggttgaccaggtcctcgacgtaatcagacgatggcaattccatgatggcaacgccttttcctgctcgagtctgtcccaagaccatatctggagtgatagtcttgccatctagggattgaacgctctcgcccttcgtcaaagccgcgtacttagaacccttctcaacgttcaattctcgggccttcttcgggtcgaactttccgcggatatcgtggtttcgcacgatatagcagacagcctctttcgagggagaagtggttgggagactctcgatagtagcaccgggccagggctttcgaacgagcaccttgatgtctggcagctcatctgagccacccggcaccggacctttgtattgttcaaggtccttggtttctgggttgcgaatgaatatggcggccggcatcttgacctcagccaatggggtttcatggagggcatccatcttccacgttgagttcaacatatcctgcacaatagactgcgtcaccatcaagttcttagtacgttggtccatatgatctccggtctgttcagattcctggaactcgtccaagctccgctttcgtggactctgtgacaacggctgcgtaactggagaacgcgccgatgggtgaggtttaataggcagggcccagactttgatgttactgtcggaccatgatggcttctcaaagggatcctcggcgccgataggcatttgcttagcgagggtttccgagtcatattctttcaaatacaccggcatgccctttcggaaaacaaaccgtcgagacgtagccagtgtatgtgtaagattcgcagcaccatgaatggtgaggttacctcgctgcgagaccgtctcgccgtcccgctccacaagggcaggggcaggggtcctaccattttggggtgcacggggcttagattttgtattttcttcggcctcccgttccgccctgcgggcagccttctttctttgttcgtcctcaatagccgccatggaagatgccaccgtatcagcaagggtcagaacaatcccaatcaaaccgcctgtgttggcccattccgtccgtccagtgacaaagacatcggtgagaagagatagcttgatcccgcgctctgtgcatgcacgctgtgtgccttctgatacctggccgaagaagtatcgcttgtctgggaagttgaggcaaacggccgtgccgggggtatcggccgttggggtcgtgatgacctgatagaagaatttcatcggggcaattccttctaccggtataggcaatggaacgagttcgagtttggatggttcacaaatcaagtagtcgtcgttatcgggccgtcgtctgttcaaggccggggcttgaagaaagtatgcgttcgttttgattgcaggttgtctgatccgaagcggcaaggcttgctcttgcaatttctttttttccgctaattgctccaatgatttagggaaagggatggggctactggagctcggctttgagtcaccgggttttggtgagtcacggcttctggcgctgcgatacaatcgtagggtgaatggcgaaattgaggttcgagagaatgcgcgccaggcgactgcgcgagtggtcgcggttgacaggacaccgcgcacgcaagaggaagccaacttggctagaatgaggggtatcgaaatagaaatttatgataaaaggcgcgcatgtgtagtgatgtcaaggagtaggaaattggtggattccaacgtttagagaaaaaagtgacggtcaatttttcgcatggccgggcagaaaatccatctggaccgccatggagttgttcttcaaataaatagcacaacagatagctcagctagatttaagtgtagatgcgcatttaagaaatacttgtgctattaaacaagtacctgatattcaatttacatgttctagttatgtaccgggttggaacttccaacgcataccattttgacaaagtgacacgcattctatttggctaaactactacaagtatacaggctatgcaataaacaagacaatcatatggccgtaaatatcaagagttgggcttttactccacaaattctttagatacgccagtaaagtaagctccaaaattccatcaagaaggtccctcgtgggagatacacgatatagtaagagacaggcgccttgaaactcccccaggacagacaaaggaaataaaaactccctcccatgattcgcaaaatatggcaggaggtttcaccgtaggtgtatagtcacaaggcaatgacaatggcgagaaagagaatagggctcacatatacaaagaaaagaaggccgaaaaggcaggacgctaatggggaatcactgaaggtgggacgtaacagctgagacacgctcgaaggcagcgtcaatgctgttgcaaagggcgttgaaggttctcttggccgaatcgctgacttcagagctgtcaatgacgagttggaactgagcattcttctcggtcgaaacaccctcgaatgtgaggtcggcagcgggcgcaggagaatcaacaaagagagcaaaggcaggatcggactcatcaatctcaacatcagggttgacaacaccaatgtcagactggctgaatgagtcgctagcagaacgctcgacaacaggagcttcattcttagagctctcggggaggctgaaggaagaagaggattttccggacagagcttcgacatcgagggccgggccctcgggaacctccatgacagcaaatacgggagtgttaccgtagttcatgtcgattcctgagttccagccggcgttgttcatgcccatgctggagtggtccataccctggtttgaaaccatgaccatgttgggctgggggttctgctgcatctggaactcttggccacggttggcgttcgagtccttaggcatagcctgcatgttgggtgcagcctgctgaacttgttgctgttgctggggttgttgagattgctgttgaggttgagcgggcagggtgtcacccatgtcgttcaggaagttggagaagtggggagatcccaggagcatgcgggccaagtcgttcaggcgggcattttcttcgtaaagagcgcggttctggaggcgaatttcgtgcgcctcgttggttctagcggccacctcactttcgagctgaccaatgtattctggagatgtgttagcaaaaagaacatcacatacgtattcgagtgttcagatagtcatacccttgcggcgagatcggaaagcgcgagcggaaaccttgttccgcaactggcggcgctccttgctgctgagctttttgccctcttcgctagcgagaagacgctcgtcttcatccatatcggcctcgtccttccgggccttggccatctgcggcataccattggaagggctgggggagccctcgccattggccatggcattctgtcgcatctgttgaagtagacgagagatacgctcctcgacgacggggtcggggttacggggaccgcggacctgagacatagcatggcccacttgatccggacgctgctgtatctgaggacggaccatctcaatttgcttttgttgctgtgccttggccatcgcagcctgctgctgatgcatgccagggtacatgcgaccgacttgtgtggacggaccagactgagccagctcatggcctccgagagcgttgggatcgacatattggctcttggtgccagggtttgcggggtagaagtatggcgaaggattcatggtttcgggatcaatctccatctccgatgggttccggcccggtgcggtgttgaagtcaaattgtgcgtcctcgcgcttcatgtgatgaccagcatacacttcagcgttcacgggaaatacttgaccgttgttgaaacccatcgggacctggctgtaagacatggacaaagcacctggtgggagaccagtctgttgtctgtgttcgtcgtattggtggcttggggcctggtatgctagaggagactggccacttgaggcaaagctggcactgcgggcgtcactggcgctgaactctgtacttgcgaccgatggttggctgaccataaccttggagcgagagggatcagatgtgtaggtgagttgatcaaagttgatgaatgagtcgagatcctggtcgtagttggccactggttgcataggatggtctgcgagagtcgccatggtgatctagataagtgtcctcgtgtgtgtagggggggggtaggcgtaaataaggcgtgagatatggggtgagatatggggtataggggggtataactgagataggttgaacgaaagataaaaaagagggagaatataaagataaagaggatccgaaaaacgaaggtctaaagaaatatggatttggatctagatggatagtgaacctgggagtgaaatggggaaaagggacaaaagtgttccggaatagcaacaggggcttgcgcgtcctttcttagtaagcgggggcctcaggaatgcagccccgtgattggcccaattgccacttgacggggtttgtttaccgtaccgtatcccgggaatgttttcactattttcagatctatatgtaacatacagatgtatacttcagctactatctactaatgagcaatcaattgcttgaaagactgtattttgcgccctatttgatagcctactagacattcaatagtcacagtaaccccctgttaattcttttgccggtcaaaccttccaggtgggccaatctcagggcaggaaccatccgatcccattggccgtcgggcgaaacttgccaagctcggagttactacagcgtatggtattgtaactgtacctttttgtccctgtcatgacgcaggtggctatgccatgggctgtttatcgaagattgtccgctttagtaaactatacattcctgttgacttcatgttgttttggatcagctagagatgcgcgagcatacagtatttttaggtcctgaaacttcgatcttcaaagacaaaaacctactaggcttgttcagactaacggtgactatcacagctagcggcgttcggggctgagccgattatttcgagtggcaccgggtgcgccaagcggtgggctcactctggaaaatatgtacagaaagaatactttgtacactttgtacactttgtacaacacacaatatccagagtacatgacccctgacccataataatactgatgttgtacggagatgtatccatatgcgcagattatgatccagggtgcgccttccatattcccatgtattgacaagaatcccttgtttcaaacccaggatgtacgtacgctggcgtctcgccggaacatacacggccaattgagccgagccctaagtgccggctagaccggtgtgagccagtcaaagacgtaaagtgggagtccggccctctcctgccccgtttgagaatcacaataagctttctagagtcggagcgggtcggccaaaaggtcctaaaggagatcgaacggccatcaagctcggtgatccgtgcacgtgaggagaggagctgttcctaatcgggctagcttgtccgactctattaaacactaaatctctgcctgtcgatccccgaaggatgcccgaggccctgctcataaattattatccacgaattccgaggttgactccgtagaatattcttccatttccaaggtttctatcaagttgcctctttggattgcccctgaaccttaaccaggcgaaacaacacaccgtggaatagctcgttattgcccctttttgttttatcctacccaagaatcaactttcccctgggcctcgactcttcggcagcccgctctggtggtgaacagaggtcatctcgatctatggcactccgtactacacacgacataggtagggctgtttcagattaccattgatccagccgcttagagtgaccgcgtgcaaagaggctgagctagttatgcgcctccgtgcctgaacagccactagcagtagcttgttccttattaaaaatagatattgaaaattttctgcactccgtacggcatttcactagggtcgatcatgccgatacataaacggtgatcactgatttttgagtcaaactagtaagtatttacaatttttgaagtctctgcaggaacgcctctttgtgcggatccttcatcaaactgttttgagtctcgggcagtggatctaggccattggctcgatctacctccacatccggcaattactcccttgccaacatgatatttgcctgaccgttcatatgattgattctcgtggcatggttcgggtacacacgtatgctacctccgctaatgcaatcacggtctagactatttctcttccttctacccattgtctggttgtctgacgccttctacaccctgatctcccggcccttcaaccctcaagaccctacactgtgtaccctgccaacggctccattttctggttgtctgacgactcattccagacccgctcagatttgaaatgagtctgagtttgttcgagactgttgaacgatttggtggagatgcagaaattaaggtctagatctagtacagcttattgtggacaatgagtagaatttggttgtgttgcaactccgatgctcgactggagatcttgatcgatcagtctagactttgtttgtttgggtattgagaacttgacctagtcttacccggtcttctgtgatatggagcagaaatatgaagcggaattgagcacatttacgtgtcgttgtggacttatacttttcgtgttactggcatttgggcgagataccgtagggttagccctcgacgatttagttcccggcgtctattagacgtactgcatcctctctataatttatatctagaaaattaagggctatgtcttgttagatatttacagattgaagagaaagaaaaatctctccatcgactttcattcaactcttttagatttcttatgttgtactgttgttccccaatatatatttctagtttctagtttggttaccataacaacgcacagaatctaaggactatcacctccagtgagacctgtagacataggtacatatacgtacgacctcctataatttagtgaataactcatagcaagatacgagcacaacgatgcaaagagcgacgccaaggaatataaattgccttaggcaccgattcattcctctttcggtccccgaccccataatggctgtcaagtagcatcagatttgttcgtattcgattcgatgactcgataaatgagaagttcaatgtgatcatagtggcgcattttgattctgcaaaggggcttgagcgtggatgccattgctactccatacatgtagttatcttatatgaacccccgcccgaacttcggcaactacttcagatatccaacacttggacctcgcgaaaaccactcaaataccaagaactccaacctgctgaagctatgacatcggccccgacaattctggctacgtgcaagcagacacggtttcatctgctagatgataatccttcgcaggaggtatgggtagccacaacaatgatctagatgcccattaacgttcaaatatgttctgttgacagatcgatgtggagggacttaacatcatagtcgcatcatctgcagctgaatccacggaagatgcctcaaagccaaagaccaaaggaaaatcaagggccaaggctgcggggagagagctcatatcagacgcgcacctacgactcaaggcaggcgttcactatgggttactaggtcgcaacggaactgggaagtcaagtgagacagagccccgcaagtactgtctacaaatctcagtatactgatgataccagcgctgctccgggcaatggctgagaaactcattcctggcatcccgcatgcgactcgcatggctattttgcagcaaacagaccagcaggatgacgttacattcggcgaagaccctaatcaggacaaaactgttttggaagccgttctcagcagcgatgaaagtaggaacgaggctgttcggatgacagaatgtcagtatgcctattcaattgggggttgtacttgactaacttgacaagttctatcgaaaagttttgagactgaagatccaatgcagcccgtgcgggcgatccgtaaaatccggcaccagaaagcagaaaagcatctcttcctggctcacaagaacgcaagcctgaaaagcggtgctcgaggtctacaagcaagaaaagacctgaaggctgccgaggggaagctcgaggctgcatcggagatgtaagttgcattaattcgcgctagagactatatctaacttctgccaggttggcccaggatgtagccgctatcgatgcggagacagtccagtcggatacccaagctgccgttgagacactacaaaatttacagtctcaaatcgaagacgtaagtcttcgtaggatgaccattcacctgctccgctaacatgaaacaagatgaaacttgccgatatgaagcaacaagcccgtcgcgttcttcttggtctcggctttaaagaagacggattcgagaagaaagtctctacgctctcaggtggctggcgtatgcgatgtatgctagccagcgttctggtccaagaccccgacatcatgatcctagatgagccgaccaacttcctcgatctgctaggagtagtgtggctagagaattacctgaaacaactccgcgacacatcagaaacaaccatcgtcttggtttcacacgacagagatttcatcaatgctgtctgcgaggagattgtcattctgcgagatcagaaattgacttatttccgagggaacctgtctgcatacgagcaagatttcgaggaacagaagctctacctagggcgcatgaaggaggcccaagaacggcaggttgcgcatatggaagctagtatccgggagaatatgaaaattggaaagaagaccaatggcgaaaataagctgcgacaagctaagtcacggcagaaaaaggtcgatgaccggatgggtcttcaagtcagcgcaaacgggggacgtttcaagctgaaccgtgatctagtcggatggcatctccacaatcgggctgagatcgacgttccgacagatgaaaagggcgcgactatgagcttgcccgatgcgacggagttgcggttccctgggccgctggtatcgcttgagggtattgtcttccagtacaagaaaaccgaccgcgtcatcctggatgacgtgaacttggttgttcacctgggtgatcgtgtcggaattatgggtctcaatggatcggggaaaacaacgctgctccgtattttgacgggacaggtgtctccttccaagggcaaggtgtcgactcactcccggttgaaagtgggctactatagccaacactccgtggaagagctgcaagaacgtggccgaggcgagcctagcttaactgcgctgggcttgttgacaattgagactgaaggatcgctgaacgagggcgctatcagaggtctactttcttcaatggggttagcaggtcgtattgcatctgatgtccctgtggccaagctgtcaggtggacaactggtatgtgaaacaatgtggaacattaaagcaagctactaataatatcgtcaatttaggtccgccttgcattagctcgaatcgtctggagtgcaccacaacttctgattcttgatgaaatcaccacgcatttggatttccacactgtcactgcattagctacggctctctcctccttcaatggcgccgtgctactaatttcacacgatcgtttccttgttcggtcggtaattgagggcaagcgagacaccgagcataagctcgatgaagatttcgaagggctggaggaggaagagaccgaagaaacgccaaggcgccggtcggtctatgtgattaaacaaggcaagatgaacgaacagaagaatggggtggagcagttcgaaaagagcctggtgaagagggtacagaagttgttagcgactatagattagttagttaactaactaaatggctgatgtcgtgcctccatgaccaattattcttccgcgggtgaagatatgatatcatgactcagcacggagcccgccgagaggcatgtgcgataagagacattcccctcattcctccgcggagtatctcattgcatatatatttgcaacatgcaccattttaccccttgaaagaacttcctcatggctggcttgtgcaagcggatcttgtcttgccctagggttgcccgtcagtggggcatacagactcgacttcagagcactcgcgccgcatcaagatctaacgccaccgtcgtccctgaattgcctcctccgcatcccgcaaccgaggcctccaaaccgtcaaaattcaagtccacgaagcccttctccgaattcctcaccgataccttcaatcggcaacatgactatctccgcattagcgtcacggaacggtgcaatctccggtgtctgtattgcatgcccgaggaaggcatagacctctcgccctctgcgaaactgcttacatccccggagatcctatacctatcctcgctattcgtctcacaaggcgtgaccaaaatccgattgactggcggagaaccgacggtccgcaaggacatcgtgccattgatgcaggacattggcaagctgcgacaaaatgggcttcgggaattgtgtctaacaaccaacggaatctcattacatcgaaaattggactcgatggtggaggctggtttgacgggagtcaatctcagccttgacacgctggatccattccagttccagatcatgacgagacgcaagggattcgatgctgtgatgaagagcatcgaccgcattctggaaatgaataaggtcggtgcggggatcaaattgaagatcaattgtgttgttatgaggggaatgaacgaccgagagatccttccgttcgtggagctgggccgcgagaagccgattgaagtgcgcttcatcgagtatatgcctttcggtggaaacaaatggaaccaggaaaagatgttctcatatcaggagatgctggctgttatccgagagaagtatcccacgttcgaaaaagtggccgaccacaagaatgacacgagtaagacataccgtgttcctggcttcgagggccgcgtgggatttatcacgagcatgacacacaacttctgtggtacctgcaacaggctacgtattactagcgacggaaatctcaaagtctgtctgttcggtaactctgaagtctccttgcgggatatcattcgtaaggagaatggtgggagcccgattgacgtggatgcaatgaacaacctgcagctgttggaaacagtacaaaacgcagcgcgccttagcgacgaaggcggcttggtgaatgaacgagaacgtgagattctcgacatcatcggcatggcagtgaaacgaaagaaggcgaaacacgccggcatggcacaacttaaggatatgaagaaccgtcctatgatcttgattggtgggtagccttttgttttttttttcttgatgattggaaacgctttacgacttgtagatcatccatatgaacatttcttttggatctcatggcattggcgatattttgataccatgtatacatgcaattgatgtgtttagacattgtttgaatcattaagctgatagatgaactagataataaaccgccatggaggtcagggtctccctcttggtcttctataccagtacatatactttcgcatctccctacagcttcccaaagtcgtctctaccaccccgggcgctctaagccagagaccacagactgtacttctcgtccatctccctctctacccaccacctcagacaccgacctccctcaccttacaccatccaagaccgtacacatgacacagatcaccgaaaagcccgaaacaaagcgcgtcgccacagccgcctgcaccgtctccttctcaaacgcccgaccctgggaaatcctccgcgaaggccaaaccacgcacaaaggcgacgtcttcagcgtcgcccggatcgcgggtatcatggccgccaaaagaacgcctgatattgttcccctttgccatcccggcattggtattaccggagtcgaggtcagcgtggaactcgttgggcctgcgggggacagggacagggatcacggcgccatgcatgtcgtggcgtcggtcagctgcttcggtcgcacaggcgtagaaatggaggctatgacggctactatgggtgcggctttgacggtttatgatatgctcaaggctgtggataaggggatggtcattgattctgtccgattgttggagaaacagggtgggaagagtgggcattgggtacgggaatgactcgtgtagttaatttgagtagttgtaggtacttgattgctatgtagtactccgtatagactctttctttaattaaagtggatgttctatctcttctccatactgcaatagccctaataccccttgagcctatctatacccgcggatcagccctatgggccgtttaaattctcctgggcttcaccgtattttcatttctattttttctttcacagccaatgatctttatatgattggcgatatacaactgtagcaatcgttcctcctttctgcattcctctatgtggccatggctcatggcccaagacattttcgagcccacatcactcaaatcggcttagccttgcagtcgaggttttgcaattttccttttttcccttcaaacatatgagaattcttaaaattcctctgtttgaggctattcgtctcaatttgagacctatggggttgtgtgggtgtaattgaaaaccctgcaaaaaaaaataaacctccttcgtttcatcattacatcgacaacgcctcagcggcaacgaggtcagcacaaaaacacagactgtgctttatcaagccctgccgaattttgtcgccgaattagaatgcatgtcttggtgacccgtacgttcgcctgggctactggcgtaaaattcaactaaccgctttatacagttcgcaagtggcggaggaaaaccgggagcgccataatggcagtgctcccgcccttgaatttcttgacgctacactattcatatttcattgcgacatgcataatcgccagtatcattttctatctgacatcgtcgccatggcgtagcgttgcctatgtggattcgattttcatgtgcgtcagtgctatgacgggtgctggattgaatacggtatggactgaatctcatggctatatctcgccgaggctaataacctgaccaggtggatctgtcgactctgaacagcttccaacaagcagttttgttcactatgcttatcctgggccatgctattctcatctccctcactgtacttctagtacgtaagagggcgttcgaggcgaagttcaagggtgtctccgatgagcgggaaagagagcgatctagccgtaacctctcggaagttgaactacaggccagggaccgagatcccgcccatgcaagcaccgggattgatctcctcgacgagagtatcgaaggacacggctgtaaaccacgcccaaagacaaccgtgctggtccaaacgaccccgggagagccatcatcccgtattgagcagagatgggtggacgacgaccagataaccgtcggcggcacaccccgtcatcatcaccaccgagtcttccccatggctggcatcggggcgagaccggatctgcataaccacccgcgcgacgcagcgcccaatgtgcccttggtcgtgaaggactcggtgtctggtctcaagggaatcctccgcggtacacagaagtacatagcctccaagggacttgtgtcccgcaactcccagttccacgatctcactcctgccgagcgtgaggaactaggcggtgtcgagtacaaggccgtctcgttgctgtctgtggttgtgttcctttactttatcttgtttattatattcggcatggtcggtgtcggtggctggctggaagccaatgatcccgccgtgacgcgcacgaacggcctctcgcctttctggacgggtgctttctttgctgtttctgctttcgtgaacagtggcatgtcgctcctggacgcgaatatgactgctttgcagttgaggtaggtgctctagaccgcccgtgtttcaatattcaaacttgctgatcttctctagggcttacccacttctcacaatgggatttctgatcctcgctggaaacacccttttcccatgtttcctccggttcattatctggactatgagggtcatgcttccggatcggccgatgtggcagtcgtggcgcataaccctggattttatcctggagcatcctcgaagggttagtcgttgcattactctaatagcttgcaggatatagacttatcatcaagcaggtctatacgaatctcttccctgctcgccatacgtggtatctactcggcacgattatcatcctgaacggtatcgactgggcagcatttgagctattgtccattggaaacaaggacattgagactcttcctaccgagtaccgtgtgttggatggactgttccaagccctaggtttgtcaatcaatatcagcaacagcgccatatctgaaccagctaacaacttatctcgaaagcggttcgcgctggtggattctacgtcgtaaccattgccgatcttcgccaaggtctcttggttctatatggtaagtgcttcggtatccttagtctgtaatatcatgctaacaaaacctctagtactcatgatggtaagacctactagtatcacacccatacaccaatcccaaactaacatctcacccagtacgtctccgcgtacccagtaacactcacaatgcggtaagcaccccccgaacccaacccaacccacactagagaaaccacaatctaacacccacccagcaacacaaacgtctacgaagaacgctcgctaggaatctacgcacacgacgaatccccagactcaccggcaaacacaagccgcagcaacgtagtaatggacctaatccgacagcacctcggccgcccaggcccatcggaaacatcgcgcggctacttcctgcaccagcagctgcgctcccagctcagccatgacctgtggtggatcgcgctggcggtgttcttcatcgcgatcgccgagtcagaccactacaacaaccagcctgtggccttctccaccttcaatatcatcttcgaggttgtctctgcgtacggctgtgtcggtgtgagtcttgggttccccgggaagaattactcgttctgtggcgcctggcatacgattagcaagttgattcttgctgctgtggctttgcgtgggcggcatcggggtttgcccgtggctattgacaaggctattatgttgcctagtgagtctttggcttgggcggaggaggaggatgctgctatgcggagggatagatctagggcttgggctcaggagaatgggcctgttgggtctgtttagatggtgatttttgatatacccccttttgtttggccattttattttttagactgtttccacggtgtgtggatttatgagacccatgatgatatgacattttgaagataaataattcttttgtaggactgagtagctacccatggtgtatcctggtaaacaaagtagacatatgcaataaccgtgtgaagtagatggacatcatcggggacatggacaaggagatatacaaattaaccaaaaattagacgatctactcgtcctccatctccagctcgtcttcatcttcatcttcactctcgatctcgacttcctcctcgctttccaattcctcttcaccctcatcctcgctgccatcgtcactgccagcaacaccgcccatatcctcatcctctgcatcattcttcttcgcctcctgtctccgcttctcttcctcgatacgaccttcttcgaggacagcagcacgctcgtcacgcagcctacgctgcgtcttaacaaacgcaccgacaggagtagtctcccagtcaacatccttgaggaaagactcgacgctagagcggttgcggggagcataggagacgttcagacggcgctcctcgatccagcgggcattggcctcaaccttctgcacgagcagcaagatcatctggttgaccttggcgttcttgtttccaccactgcgggcagagacctgcttcagccagcgcttgagggagacaatgacgggcacggacagttccgggaacgcaatgtgcttggaccacaggacgaagaactcggaaaggagttccgtgacctgctcaccgatgccgtcctggtaaatgcgcgagcgcaggtaggatttaggcgcgcggatcgctgtgttgaagtccaggggcttgagcgtgctggacttggcgggcttgcgcatctccgctgaggtcaggacctcgagaagggaagctgagagcgggatataggtgcctgtggcacgggagatgcggagcagggagcgcgtcaattggaagcgcagggggaagtacgtggcggtggggatgaggcgcatggcgcccagggtgatttgcacgacggggtagataaggggacgcagagcggactgcttgccgatttgggcctcgacaaggccatcacagtgctgtgaaagcacacgggaccagaagtccagcgagtgcacgtattgccagttgtagatggtcttgtaggactccttggaggtgtgggtgatgctcttgcgcaagtgcatagcaagctgacggatgaaggagaatcctgctgtgtatgagacgttctggtcaatgccccagatttcggctgcggagttcttcatcaagttcacgcctgccagagtgtgcaccgttgtgttgcggctgcccttgacaacaccctcgtaggtggccttgagcacactctccctgatacctgcatctcccagaaccataaggcggcggagaatcaagaaacctgtgatacgggtggcgtcggccgtggacacatcagaccaaattccgacgacaatcttgactagtgtcttcagcaccttgcggaactgaagaaggtaaggcagcatgggctcaattgacgccagggtcaacttgagtgtcgatgcatccgacaagttaatcagaagctgatgaactgaagcagtgtgcgatttgatcagcggtgtgagggtcttgaatttcttggaatccaatgagaccctgatcttgccagaagcgctctctttgacggggagatgatgggccaggaccttggggatggtgttgagggccgtgataagaacctggtggtacacgttcttgtcggagatggtgtatttttgctccggggcatcggggtcattgacataggcggccgcacggaatgcgagcacagcctggcgcatagctcggatcgagttttgctcctccatcaacttctgccacttcttgaccatctcaatagtcaaggtctcatcctcgggctcctcttcttccttcttcgacttcttcttcttcttcttggccggctcctcgtcttccggttcttcgctttcgctcagagcgtcaacctctgaaagatcgccttggtcaccgaaatcgagcagttcagaatcgttttccttaagatatttatagaactcggggtccttgtccttcaatgactccagctggtctttgtgctcgtcataagcatcgacactgtctgcgtcgtcattgtcactctcgccctcggacgcctcagcatctgcctgtgccttgtcttctgagcgcttgcgcttgccaatcttgggggtggtatccttcttgctcgccttctttcccttctcttcgggaatatcgaagccaccagcgaagaaatcgtcgacgttcatttcggaaaaggcattttccttcttcaattcctccgggttcttctctgcagcggcttcggcttcggcgcggcgagcagcacttttttccttgcgcttgtcgttcagttggtgtctctgcttgatcttggcatgcgctttgcgtcgctcaaggacatccggcagacggttctgcacgaacttcttggtcgattttttgccgccaaccattttgagagagtaatgcagaaagagtctgcaagtgtagcttggtcggaaaatggctggtcaaaaaaaaaattggggagaaaatcggcgggtccacctttcagaccgcctttggcatcgagcgataacatccaggcaatctacaagacaaccttggaagacaaccttcgattacgattgacgattgacgacttacggttattgtacatagcgagaatttatcaacaatgtactcacagcgcccactttcttatgcaccgaccccctacagctacacacccaatcccgcccggtcggccacaatcaacctcgatgaagtatgggtccttgtctccgcattgatagttacattgactaatgccactttcttaggaagtaaaactagcatccagtgcagtcgagcgcgacttatacgaatcactagccgaaatatacagcatcattgtcaccctggatggactcgagaaagcatacatcaaggatgtggtcaccgaggcagaatataccgagacgtgcacacggctactgaagcaatacaagtccagtattggagatgagacagtatcgcgggagtttgtggatctggaaaccttcaaacggacctggggggtgagtgttgctctccattttaccccgcaaactccgatgcatctctgacatatgtggacaatatagctagaatgcccacgagccacagagcgattgcgcattggtcttccagccacagttgagcaagcgtctcacggtggaccgacccccagtatgggtgcaacggcgacaggacaggctggcggtgcctcgggtagtcttattctggcagcaaccgaaaacttcatcaccttcctcgatgcattgaagcttaatatggtatcgaaggatgcactgcatccactcttatcggaggtgattcagtctgtgaacaaggtaacagataccgatttcgaagaccgcggcaagatcattcagtggttgatcgcattgaaccaaatgcgagctacggaggaattgagcgaggaccaagcgcgtgaacttgcatttgatattgagcaggcttatcagggcttcaaggctacgttgaactgattgggggatcattgacttggtgctccggcaaggcgttccaatggacggtagaaataccatttcgttttgatgtattgacatgttcatcggtttttgctagctaaatatacccactctggcttgtttttgattgagtatccttgtataagtacagcgatttcaggcatctactactgtgtctcgaagagcatctagcttgaagacatacggtgttcggactaacctactctatttcccgtccgatatcaactgtttctcactcacagcagtcttcatgtcattcctgttcttctgttgatacattgatgcctgatagttcaggcgacattcaacccgcggaacggcagcgccggcctttcctctttgggaatattttcttttttctccgccacaatttcgtcgagttctcctggctgtgaggtcaatttgttgattttcattcctctccggcaacacctagagaacatacagttgtcaccatgatcagtgccacagatgagcctctacatggttagttcacaattagcccctctggttcatctggtccacaaaagataatggaactgataagcgcagtgcttgacctcccgcaagtctacgagaagccctctggaactgatctcgtgaaggctttggctctgttgagcttgcagccacgcacatttggcacgaccgctgatgtcgtcaaaggccctgtagtccagcctgcaggagtgacccggtatctcacatccatcatcgccagtccattagcatggctcgacaacgatgaactccgaggggcaatctgggatgcggccgctgcacgactaagtgaacggtctggtcgaaccggtaaccaggcgatctatccagctgtgttatgttatcccgctgaccgtgactcattcgttcccagctatgccggcaatgtctcgaatattcaccgtgcccacctcctccggcgaagaatacacactgaccctccacgaaccgtcactaactgcggataacctcggtatgaagacctgggtatcttcgtatcttctctcacgccggcttcacaatcttggatcgccgccagcacttgtcacctcgtcggctactccctccacattgaaaccccagaaacctctgcgggcactcgaactcggtgccggaacgggcttggtcgggctttcctttgctgccctgcaaggcgagtctgcaaccgttcacctcaccgacttacccgagattgtccccaacctcgctcacaacgctgccttgaacgtagaactcctcaacagaaccggggcgactgtaaccaccggcttgcttgactggtctgtcacaccgtcgccccttccaattgcggaagagcagtttgatgtgattctcgcggcggatccactgtactcgcccaaacatcctaaatggttggtggacaccattaagccctggctcagccgtgcgcttgatgcgcgagtcgtggtggagatgccgctacgagatgcatatctgccgcaggtgaatgagttccggcagcggatgggcgagttgggcctggctgtggttgaggagggcgaggaggtcggttacgatgactgggagagtgcggatggaggcgcactggctgtcaactgctggtggtcgatttggggatggagtgaaaaggtatagtggcggtactaccaggtcatattgggaatggtgaccaaacgaaatgacgataatagacgatacacgatatattagaaatagggattcctatatacatagacattggttattgagcaatgcaaaccttggaaacgaatttctcgtttcactttttagtagaatcaacttgatgaaccaggaacattgttggtcgttggtaaaagaggagctgatcatcacgtggcgatgacgtcgggggcacatctcatgtccagtggacttctaccttgatctatgtttctaagattcattaataccaacaagaagaatggcttatttttatatccattcacagagaacagctattctctatacccgtatggtcagtcaatagcctagcgtcattcaaatcaagcaagtcatgctaatgcgacaacagagcatagtccaggctccagaccaaactgctacaacagccgcgaattcctgaaatctgatatatcaagctgctattgatagccagccagatctaacgacgaaaattgcaatcgcatataccaccaaacatctgcgcaatgattggacttctagcccttacctccatcccaacggtgacaggtgtctccctcgcttctagcgagcagcgcaaagcaaaccagcgcaaagaagatgcacgtcgcatggtgaagttcaacatcgtagcagaatgcgatggcgacacagatgatgaccgcgaattaaacggcatgactgttgttgtaagagacgagaaggtaagtaaatccaatgcaaacaggattaaaagtctacaggaacctcacaatccctccgaataatattttaatcagagctcaaattaaagaccacatagactaacacttttaccctccacaggtctacctcgccgacccagattcctccaaacgatccccgccagctttcacagccctggccttctatatcgagtacccagaaccggaagaattgaaatatctcaagcgcgagcgtggcctcggcctgccgacttacgttcaggacaacccgccccttcttaactggatctacgcagataaggaaacgcatgagttgcggtacgggaatcggtcgcagagcgtggagcagctggtcgagccgtgggactggtgtaagaatgagaagtacattttgctcgaaaagaagcagaatgctttcattgcggttgaagaggaggagggtcaatgggcgcttcattatgatcgggatggcgatgagcttgcgcgcgttcttgaggagcagggactgttggattgtgcttttgtgcctgtcaaattggtgaggaaggttgttgaggagaagccgccgccgccgccgccacctcctgctgctgctgctcaggctgcagctccccaggttcaggggaatggtcagagccagaagtagatggattgggagctggacaaccgttatgattgagccggacttttttgtgtatatacttgatgagatgacttaatgcatttatgattcgatcatgattatgggaataccacggtagtaaccttggaatattttagtgtacagagaaaaattggacatttaatcatccagtccagcccagctaccagtgtcgctgacgttgccactaaccgctgcggcagccttcctgttgcgactggccgcaatagcaccccttttgttattctccatgcgacgttcaaagccactcttggtactaattctcataccacgggcaccctttccatcatcctccttatcggtcaatcttggggcctggcgcgccttgacaccatgcctcttcatatccttcttgctgttcttgcttaggttcggcagagcgtcgagcagccatttctggatggacttctcgccctcttcgccgccgcgtagcttctcgctgacgtcgatgatgttggcaatgctcttcacgtagggaatgtcttccttagtgtagtaggtgacagcgataccgccctcgcgaccagcgcggccggttcgccccacgcggtgaacgtagacggcggctgagttggggatatcgtagttgaccacgccattgataccgcggaagtcgacgccacgggctagcagatccgttgtaaccaaaatccagatctcgcctttgcggaaatcgcgcatgatatcggaacgttggccatctgagagatctgaatgaagaaccgcaatacgtgaggatccacctgcttccgcggggatatcgtatttgagttcggagtgcagagccaccgcacgaggaatggtctgtgtgaaaatgaggaagggagggcggaggcggatatctgaggctgaggctgcagccgggcgaagaagttgacgaagtcccatcagtttaccttgctctgttgctgcgtacacaagtttgtggtcaatgttggggattgcagaatctttcaatcctacaaccagacgaagtagtggatgtggctcgcttggcttttgtcccatatcttccagtcgctctctgatggtcgacttggtgagatcctcgatattggatcccatggtagctgaccaaaggccgacacgcaggtcgggatgtgagcacgctttccagatatcgagtgtctgttcccggaacaatgggtccaggagaacatcggcttcgtccatgaccagactccgcactagaggtaatgttgccacggtggtcgtccgattcgcagataaagcattaaccaacattagaggtgtagtgacgagaatatcactcttggtgaccgggatgttggctcgctcctttgctggcttgctttcggcaccttcatcttcggacccggatgattcttcgctgttctcgtcaagaacattgccatcaccattatctccaacacgcataccctttctcataagcgtgatcttcacgccagttccagccactagcttgcggccctcgttgacaatctggcttgcaagctccctggtgggcgccacaactacagacaaaataccatgctcgtccgggtttgagtggtggtgtcgaacaattttgttgatcacagggatcaagaatgacaacgtcttgccgctgccggtgggagcaacgaccagaagatctggctcggaagactctccaagaagtaatggaaggcttccaagctggacctctgtaggtacggtaaaaccttgctctgcaacattctctgcaagccgcgaggagatcttgtatttggaccgaagttccttgaagttaagtagaggctccgggaacaagcgtctggcacgcttctgctccttcttactgagagtcggcgcctcttctttctttgacttcttcttctttttcttggactctttggtagacgtaggctggacttggatctcttccaagtcgcgcatgtccgtaaccttgatcttgtgtgagttcaagatagtgcgacgctccacttcatccatggaatcgtcgtcatcggatgcggcatcctgagcagacaatttctcagcgtcctcggtcgcagcagcggtttccgtcacactagctgcagggcgcttgtttgaactgaaaaagtcgagttcagggacatcttcctcgtcctgttggacggcagcgcctctctttctttttttgccattcttggcagactcgagcttgtcggtctccgccgtccggaagagctgcgggttagctgctttcccggtggacggcagacgagagtccgaggccgaggaggtaggctttaattttgttgacctggtcaacaatctgaacgcatccatatcttttgtggttgagtcgaaaatgtcgatgatattctgaaaagaaaaaaaagtggtccgccgactttcctcccggaccaatcagcgttgagcgttatatatggccgccgccgaggaaaaataacaagaggataaaccacagatgaagtgtctgaacataagacatatatgatatcaggactatattcatacctaggggatccgggtcatgattacagagaggtgtgggaagaataaggatagccgaagtcaataaacctttagattacagtagcttttagagcacaaatagcacaggaatgaattgcaatgacaaggtctatctcagacaacagtttaaattccatcgtctatcatacacagcgcgggacgattaacatatgaaagaaaggaaaggacgattctcatctatcgacatccatttagtgcgcgtgcgcaggctcgccacggtaaccaataatgttcatccgaccgatcatctcgccaacagtgaagaagccaatgacctcagcggcagtgacaccggcgagggcgagctgcttggggctggcgttgcggatagaggcgaggatagacgagggggaggggagggtcttgagggcggcagggttggtgatgaaaggctggaagtaggactggaaggtggccaggttgctaggaggaattgttaggtcgggagtaaagaatcgagtacggggtccgacttacggaggagccatgttctggccacggaacaccagtctgccgagctcaattccgaccttggagtagtagatggtaggagggatcatggctattgattgacggttagttgtgcacgttcgcgaacgtaacccgcggattgaggtcaacaaggaggttgggactgggcgccacgattccaaccggatcaatcggtcaatcgttgccttttttcttttaataagtacccaatgtccaacgctcctttgtagccatccggacgggagaagaggagtgtcccttacaatcgacgaaagagatgaccttgccggcgggtccaccgatcttgcgcagggcaccagcggcattcgcgagggcagggccagcggaggcagagaccttggacagacccgcagaggccttggaggcagctgaggaagcagcctcaccagccttagtggcagcctccgaggtggaagaggcgtgtctgacggcggttctccgggtcaggaactgcgattgccgcaggacggcacgggtgacggcgggcattttgaatgttgtggaggaaatgagtggaaaagaggagggaagcaaaggacacccgaagcagttgctaataggagggcagtatgatctaatgatctggagaatcgcgcaacggagaaccagatgaagatttgacgctcgggaacttcaggaattacgggtcacgtgagtcgccgtttatcccaagtaaacaatttacttttctggaatataaatttggaggagatgtaaggctttatggatttacttttggatattgaagcgctagaaggtgtcaacctgaaagtggatggtaacctgagcaccttgttatagcattgtacattcatacctacatccggccttgccagtcgaatcacaaccggcacttcactccggatggtagaaataagttgataatttttttccttctagacggattgatgaatatatgggcttctacggtgtgataaatgctccgtagatttaattttcaaaaaaatacgcacatcgaagccattgtaagccaaaatatataaacgcaatattttgtatggagtatagatacactaattgttccaccagtcagtaagattgagtccagatttccaaaatccgatgcaattaatgcatcaaggacaacagataaatggtatattgagcaaaaaaagcgagattagagtggaatttactataagaaaaagcgactagcgacctataagccagagagaatggtccaaccaacatagaagctacccagggaagtatcagtataaagagcaaatatactaggggcttatgcataatgctacagcacttaaaccataaatctgttagatatctacatgcatagctgcctcctgtattcttcatcgtcaccttacaattgtgacaccactagacaaccgtagtagtcggtccaacgaaaaatagcacaggatgagcctagggttgaatttgtctcacacaatactacctccatgtaggtagtgaaataggaagagttgttacgcagctcctcactgcctatgatatatccgagaaattgattgctagatcctggtaggcgcgtaacacgaagcatgcagagattcgagtatggtgagacaaattgtatctacctatgcatgttgtacatgtagacatcgtatatagtagagactttcatggatgtaaagaatagacattgcctgtggctgtaaaaaggtttgcactgtttgtctcggaaaaatgaattcatctccgccggagaattgcctctcttgttgatgcaatgggttctcaccttgaccgcattatttacttgacccagagacaccccagattgatttctgaaccgaaccaagataacatgagaaaatagccctggaggaaatcagaaccgggagccttcagcacaatattaaccgatcgccgattaacattcggcccgagatcgagagcgggcaaggattgcctcattcagacggaaaaagcagttggacccccgcgcggttaaatcgaaagcccctccactccacttttcgctactccatatgtatcaccgtggggtgaacaatatgagatcaccggacattgatgcggttcgagtattaaagtggctgtttcctcgcatttaggcatttgttctccattttcttcctctcccctctccctctccctctccctctccacactatacaatgacttccgcaacaactgtcactaagaccaacatcggtgtctacaccaacccaaaccatgacctctggatcgccgaatccaacccaacagtagaggacatcaattctggcaagggcctgaaggctggcgaggtcacaattgaggtgcgcagcactggtatttgtggatccgatgtgcacttctggcacgccggttgtatcggcccaatgatcgtcaagggcgaccatgtcctcggccacgaatcagccggccagataattgctgtcgcccctgatgtcacccacctcaaggtcggtgaccgcgttgccgttgagcccaacattatctgtaacgcctgcgagccctgtctgaccggccgctataacggttgcgtgaatgttgctttcctctccacaccgcccatcgatggcctgctccggcggtacgtcaaccaccttgccatctggtgtcataagatcggcgatatgagatatgaggacggtgctatgttggagccccttagtgtgtccttggcggctatcgagcgcagcggtctgcgtctcggtgacccgctgctcatcactggtgccggtcccatcggcctgatcagtttgctcagtgcacgcgctgctggtgcctgtcctattgtcatcactgacattgacgagggccgtttggcgtttgctaaatctctagctcctgaagtgcgcacttataaggtggaaattggcaagtccgcggaagagtgcgcggacggtatcatcaatgccttgaatgatggtcagggttctggccctgatgccctgcgccccacgctggccctggagtgcactggtgtcgagatcagtgtcagctccgccatctggagtgtcaagttcggtggcaaggtgtttgtcatcggtgtcggcaagaacgagatgaccattcccttcatgcgtctcagcactcaggagatcgacttgcagtaccagtaccgctactgcaacacctggcctcgagccatccggctggttcagaacggcgtgatcgatttgcacaaattgattactcaccgctactctcttgagaacgctctcgaggcctttgagaccgctgctaatcccaagactggcgccatcaaggtgcagattatgagctctgaggaagatgtcaaggccgccactgctggcgagaagttttgaacgaagagagtaaaaagatgagcggtatctgagagcattagtgggtttctggttggggtcaagagcggccgttggcgttggcgattttctttctatattcacgaatgatgtctagaggatgccattgggtagaatagaaagcacatgaaatggctatttgacataatctttggtcgatgcgatgaagaaggtagaaactgtagaggcacaattgtcaatgtaacagatggggaccttgcaagtcaaccaagtcaaaccctcccccgacgtcattcccggcaataagccgggctaatactggggaaataacagcaacaatcaaaaatggggtaaaaaatggaccctgcagcgtgaatccggagctactggagctagggtaccttgtataggcccgaaacccggggatggcgcacagccaagagggaccgtccgataattgcccgtctccccgcgcaaacgtttgacgatgcaactgagcaatatgtcaattccagctaatcatgtggaaaacaaacagttttctcgcgtatccccttgattcatgttgcatcactccccaccacccctcacttcagatcccggccactgcatcctttaaaaggtgcactgtccctcctacatcttgagtgtatcctgctgtgctcatcttgtgcttcttcagtgctcgcccgattttaaacatgaaaggcgcactgcttttcctggctcccctcgtgggagccgccgtcctgggatcgacatctcagcttgaccattgtcctggctacaaggcttccaatgtgaagcagttgggccagacattgactgctgaccttagtcttgctggagatgcctgcaatacctatggcactgatcttccaaacctgaagctcctcgtggaggctcaaactggtatgcttcttcatcattcccaagtgaatgtatactcataattctataagaaacccgtctccatgtcatcatctacgatgccgatgaggaggtctaccaagttccagaatctgttctccccagaccctcgagcgcaaaaggtcaccaaaaggagcccgctcttcgcttcgacttcgaagagaaacctttctcattccgcgttctgcgcggggacgaagttctcttcgacactactgatacaaagatcatcttccagtcccagtacttgaacttgcgcacttggctccccactgatcctaacctgtatggtctgggtgaacacagcgattcgctgcgtctacctaccacaaactatactcgcacgatctggaaccgtgacgcatatggcatcccctccaacacgaacctttacggtactcatcctgtctacgttgatcaccgcggagagaatggtactcatggggtgttcttcttgaattcggatggaatggatatcaagattgacaggactgctgatggcaaacaatacctcgagtacaacaccatcggcggagtccttgacttctacttcatggccggtcctactcccaaggaagtgagcgagcagtactcggaggtcgttggccttcctgctatgcaaagctactggacgtttggggtatgtcatttctaacttgaatgttttgagaagtaatattctgatcagtattcctttagtttcacaactgtcggtatggttaccaggatgtatttgatgtcgccgaggcagtttacaactacagccgtgccggaatcccactcgagaccatgtggaccgacatcgactacatgagtggtcgaaaggtatttactctagacgatgagcggttccctctagagaagatgcgcgagttggtttcgtaccttcacaagaacgaccagcactatattgtcatggtcgatccggccgtcagtgcctctggtaagggataattacttgttcccctctcacttctgctctaaccctgtgtgttaccagataatggtgcttacaaacgaggtcacgacgagggtgtcttcctgtaccgtgatgacgagcgtagcgaactctacaaaggtgagtttaccatcagaagcacaattcccaccttcctaacgtaatctaggcgtcgtctggcctggcccaaccgtctacccagactggttcaacgaagacacccagaaatactggaactcggaattcaagcgatttttcaaccccaaagacggtgtcgacatcgacggtctctggatcgacatgaacgaagcttccaatttctgcccgtacccctgcacgagcccagaacagtttaccaaggatgacgacttaccccctgcgcctccggcagtccgatcgcctccccgccagatccccggtttcccggctgatttccagcctgggtcttcctcctctggggcttctctgtcgcagcgtgtgaagagaggtgatgttgctgttgagaaacgtagcatcaacgagaaacggagccagggtggaaagggacaaaagactggcttgtctggtcgcgacctcattaacccgctctatcagatcgcaaacgaggctggctcgattagcaacaagaccattgatactgatctcattcatgctggcgagggttacgccgagtacgacacacacaatctttatggaactagtgagtcccctgtgtttactatcaataacctttctaacaataacctagtgatgagctcggcttcccgcgaggcaatgttgaagcgtcgaccccaggtgcgacctttgatcatcacgcgtagcacctttgccggagcaggctcccacgtcggccattggtaatatcaacaaatcccaaatcagtaccatagaatatgctaacccaatcccaggctcggcgacaacttgagccaatgggataaactgcgcgtgtccatcccgcagatgctagccttcgcctcgatttaccaagtcccaatggtcggcagcgacgtctgcggcttcggcggagacacgacggaagagctttgcgcgcgctgggccatgctcggcgccttctctccgttctaccggaaccacaactcgctcggcaacctggcccaggaattctaccgctggcccgttgtcaccgaggccgcgaagaagatcatcgatatcagataccgtctgctcgattacctctacacttcgttccaccagcagaccttgacgggtagcccgttcctccagccgctcttctacgtctacccggaggacagcaagacctttggcaacgagctgcagttcttcttcggtgattccattctcgtctcgcctgtcttggatgaaggcgccaactcggtcgatgcctatttccccaaggatctgttctacgattggtttaccggtcttgcggtgcagggcgatggatccgtcaagacgattaccgatctcgcggttaccgatatcccgatccacatccgtggcgggagcatcatccccctccgtacggagagtgccaagaccacgacggaactgcgcaagcgcggctttgagattctcattgcgcctggtgcggatggatccgcggcgggtgagctgtaccttgatgatggcgagtcgatcgaaccggctagtgctgcagagattcagttccagtacaagaatggcaagctcaagatcctgggccggttcgggtatcaccctaatgtggttattgaggctgttactctgctcggacagaagaataagcgtcgcgacgttgaatacgatgctcagagacagagcattacaaagaaggtcgacatcaagttgactggacctgctgaggtgactttgtgagtttcctacagtgcatcggtgatattaggaggaggttgaattatggatagtctttgaggtagtcgggctctttttttagaaagtgggatccatggtcgcctggaggttatttttccggggccaccacattcttccaaggtttcggtaccttgtagtactccaatgccacgttttactcaagtttgatcttaatttaggggtctcagccatggatcaataatgtgtgttgtaagcgagtattttactcggcaagatgagtcgacacggtgattggatagattgagtaatgttcctgcatgctagccccatagccaaggcgagttcatagccaagcagacgagtgagttagcaattgtgtaaatatgactaataattcagggtctgaaaggcaaccccaaaccaataaccccttgcatgaccttgcatgagaggaggtggaggttaggagggagaaagacactgcctggatacaatgaaattactctttcaactctttcaactctggaacccttgaacatttgagagacaagaataaatccatcgctattctaccaatgaggcaatagggctaaatcctgccaggtactagcgggctattaagggatacgcgccgagggaaactagttcaggcacaggccgctagttcctgagtcatctgatagaaaacggcgaacccgtggtcttgatagttattattagtatcggattggggcaattttacgcgagcagtgctgagtcgaacatactagtatattgttatatattgtaaaaggcaaccaaagcggaaactgaaaggaaatgtcttggacaaaggtctcatactgttgtgcggtggtcttagtggttgggtggcccgtgtttcacgattgcatatggatgcgataagtaatgataggcgttaatttgttagatggggggtttagggtgatccataagaaggctatccaatactaaagcctatgattgttaggaggtaatagatgtaatagatgtacggagtaataaatgataaatgccgtggttgggattgtaatataaaatccaagctggggatgaataaaaaaaagaagcccctcctgataaggccgtaataggctttgtcagtggagctatttttgaaaaggtctcataatacggagtacatagtatgatgtatattatcctattgaattttcttttatggacccttgatgcaaccgtagttgtgctcataactacgcgagctcaatctgtaacatctgatcgccgtgatcggctggaactatacaggacgctttgggtaaatgtacggattattcatgtatggatgtatggatgtatcgtatcaatacaatgccacccgtggttgtttccagcctcatccgtgtctcacgacccgcaaacccaaggacatgagtcttgggtgctccacttccccctcatggaagatcccaaaggggtccactagactcgtccgaccttttctatttgtctcagtggttcgctggccttgtccgttcatccaatcatgtcctgccagtcactcccgcctccctttttttagtagcgtgtggcagtgtaatatatttctactgatatacggaatattccgtactttgatatggagatagatatataaggcggtccctgtcgttccttcccaaggttcttactataatcccactttcgtttccgctttccacgctcgagatatttatatttaatagggtcgcttcctggacttcctttcttttcgtgttcactcacactcacttcttgacgcgtatcatatcatacaatgccgtcgttcatgaagttcgcggctgcggctttcgccgtggctacacctttcgtttctgctcagacttactctgactgcgatccaatggagacaacatgccctgccaacaagggtctggcttcgtccagcgctcacttcgacttcacccaggctagctccctcgaccagtggaagatcagtggcggacaagttcccactaccgccaacggtgcccagttcactatcaacaaggaaggagatgctcctaccatcgtcagcgatttctacttcttctacggcgaattgtccattgagatgaagacttctcctggccaaggcattgtcagctccgcgtttttgcaatccgatgacaaggatgagattgactgggtacgtgacatcgaaatcggatcattacttccaacatacagaataattgctaaccgaaatacaggaagcattgggcggaaagactgacaccgttgagaccaactacttcggcaagggcgacacctcgacttatgatcgtgagacctgggtccccgtcagcactcctcaggactctttccacacctacaccatccaatggtccaaggagagtatcacctggttgatcgatggcgcgagtctccgcactgtcaagtacgcagatgcccagggtggcgctcgcttccctcagacccctatgaacatccaccttggtatctgggccggtggtgctcctaccaacggacagggtaccattgactgggctggtggtttgaccgactactccaagggtccctacaccatgtacatcaagagcatcactgttaacaacgccaaccccgccgagtcttacacttggtccgataagtctggctcctccgacagcatcaagttcaccgggtccaacgccgtgagctctcgcagccctactactactgatgctgccaccgtctcctcttccgaggctgcttccactactgagtctccttccacctccgagactccttctaccaccgaggctccttctactactaccgagagcacttccagcgctcccactactctggctaccaggacctccatctcctctgccgagtcgactgccgcttctagctcttcatctgccgagtcgactgctgagtcgactgctgcttctagctccggtgctgaatccactgccgcttccagctccggtgctgccggtgcttcccccagtggctccagcagctctggctctggctccggctccagctctggtgcttcccctagcggctccagcagctctagccccagctccagctctggttctggctcgtcctccagtgccagcgctagcgctagccccaccttcaacgcagctgcctctgtcgctgctacctacttgggacccgtgtccctcctgggtctggtgaccgccctgctccagctgtaaatgtcccttttgagcgctatgattttttgacgcatcattaatgacacgctcctcgaaagaggatacttggctggaccgggtatggtaatagttgatgggatgcgattgtaattttttctggctgtaccattttttttcccttttcgttgtccttggcgcccaaatgcctgcaacctatcctatttgttaggtggcccggatgtgttaattggcatcttccggtaactggcgattttctttgggcggacatcatgtatctatcagcgtcatacatactttgccatcgagcaaacatgcaataatatcaagtcaattgactttctcaagcactttaatcttttccattgtatacaatcgaatctagatctttcaccgcttgtttctggttgctgtatatcccttgactgttcatcccatcgtgctcggctaggttatgtacgttccaacaccaacaccagcatcacattcgcatcaatcatatgcataccggtcctcgcttccctcggcttagagtcccactatggtctaactgcggacgaacacctacagaatcccggaccctgggaaaatttgcaccccatgaaccgtggatcaggctgttgattgaacttgaattgtaatgggcctgattgtggattggctggtgatgaattgtgcctaggcgaaatgtctgtagtcggattggttggttgagtattgatgtatagccgaaccgtggttggcgcaatatcggatacattcgtttccaggggtttgggtttggtttaccggatttactatgttgtatgtatgtatgtacgatgtattgtatgtgtttgggtgtgaattgtatgttttacttcgtatatcgtagtaggtacaacatccttcgtaaaaaaaaaaacaatcgtaaatggtaaaatactgtcgtggctcgttattgcgtctaactcatctcatctcatgttctcggatagaaacgcccaaagtgcaaagaaaaaaaaaagtagtccaaatagcttgaagaaaacccttcaactgaaaactcgatcaactttcggaccctgacaaaaatccgggattctcctcagggtccccaacccccgtggagacctcaattcaccaagtggacccagccccagtcgcacgtcgcacatcctttaactggcgtgataaccgcaacaccgagtcagcaacaggacggtggtgcgtggccgcgaccctgagcagggcaagagttgcggcgggccggggtgtagatgtgggttcggtggatgcggtagaggacacggcagacgatgacgactccgtcagtgcatctgcattggcatctgcatctcctgacgatcgcccccggaacaaatatgccccgaagggtcccagcgggagcgaatcgagtacggagtatagcctatcgctgctgctgtcctcagatgcagatcggtgattgtgcaatgttggactccgccgttcttcgcgtgttacgatcccgtccaccgcttcgaggtggtcgtctattgttatgaatcgcgtgccgagggagtctgctttgctgcggatctgcgcgcgcagtcggtctagatactcttcgcgtcgtcgcagctgtatcgcgagtcgtgtgtctagagctgcggtgccgcttatttcggttgctggtcgggaggcgagcaggctgtcgattgcggagcgtaggtcggcgcggagagagtcgaattcccagactgctgtttggacggcttggttgctgccggtgaattcgagatccagcgcgttgcgggcgtctgggaaggttgttttcagttgcgattctaggtcagcgagcatgctttcgctttgtttgaggattgcggatagaggtgtgagggtttcgagggccgtgtcgaatatggattctagctggcgctgggcggttgcgagagtctcctctcggggtgttgtggatggagggtaggcgctgcgtggttggtatgcagggagggtgatgcagctgttggggtagagagtcttgatgcttgggatacggcagaggtctttggcttggtagactacctcggggagaactagcagatgcaagataaaggcgatcaacactgcgttgactgctttgcggacgagggcactatggccacgaaagatggatttgcatttcacgactaggcttgcttgtttggtgggggtcgtctctgcagacaaaccagcatctgcatctccagctttagtggtctggtcttgctctttctgctttacatcattcggcgtgaacactttgcgtcgttttttcatgctttctgggccttgctgcatcggagtccgtacatattctacccaagacccgtctatgttaggtgcttcgcagatagagggcatgatgagctccgggcctgatatagtccatgatgatgaggatgtgggtgactctgctgacggattggccgtctttctggtcgctttgtcgctgtcatgccggcgatttcgagttttggtggggtctttttccttcagagaaacagttgatgctatcacccaggattcgccaagagctgagcgatctggggtacgaggctgttctgtagacatggcgtaaacatttcagcaaggaaaatgcactttgtgtaatggttaatagttctgtagttaatatctcatgactcggagtgtttcaacgtatgtttgattgcgactggctcaatcagaccgcacgcgtaaagcggtggggaagaaagatcggagaaacgcggccgaggaattgagaaccttcagcaaccatgcgctcattacttcgcttgagaccgtccttgcctggcgttcgatctctgccatggcaatttgcacgatcgcgaccgctgtcatacacagcgattcgcgattgctcgtgttctgataaaccggaagctcccacgatacctcccaccgaccatcgagctattggaaccgcccaggagctcttcacatcttcagtctacagtcctggatctcctttattcctcccgaatggcacacatgttgtcaacaaactcatctccttcctccgcacacagtacctacaatatggcttccgtgaagtcctgactccgatcatctacaaaaagtcgctctgggagatatcgggccactggcagaactacaaggatgatatgtatgaggtgaccggccgaggagctagtggtgaggcagagggcgaagtgggtgaagacgaatcctacggactgaagccaatgaactgtcccggccactgcctactcttcaagtcgcagaatcactcctaccgcgacatgccagtgcgctatgcagacttcagcccgctgcaccgcaacgaagtgtccgggtcgctatctggcttgacgcgcctgaggcgtttccatcaggatgatggacatctgttctgtagaccgcagcagatcaaatcggagattgcatcggcgctgggatttgtggatatggctatgaagacatttggactcggtccgtatcgattggtgctgtcaaccagacccgaaacggattatattgggactttggaaatgtgggataatgctgagacgcaattgcgcgaagctctggatagcaccggacgcgaatgggcgctgaatgaaggcgatggtgcgttttacggccccaagatcgacatccagctccaggatcaagctggaaagtaccaccagctatcaactatccaattggacatgaacctgccacaacgatttgagctggaatatcaagttgcagagggggagccggactacaatccagccacgcccggagttgcaagaccagttatggttcaccgcgccattttcggctccttggagcggtttttggcgttgctgattgaacagcacggtggtcactggccattctggatttctccgcgccaggccattatcctgacggttaaccaagacgatgctgttgtgcgccgagctcaagaagcggccgccaagttcgctggtttccgcgcattgctgaatgatggtagcgccgagtcaccccgtccactgtcctctgtcgactctacgttcttggtggacatcgataccagcgcacagaccctgggaaagaagattcagcgcgccaaacagatgaagtacaacctcatcttcattctcggaccacgggacctggccgatggtggcatctccgttgatgttactgggcagatgaagagcaagacggataaaaatgctcagacattgcaggcgctgatcaaagccagactaggcgatgatgcgctgcagaaccctcgagctatcaagcttagtgtggacgaagttcatccgctattggtggaactcgagaagaactttgtgtaactttgtatgttgtataactatatgtgttgtcattttgagcgtgcctgactggatctttgccctatcattgtatattagaccgatcttttccgaatccaagtcatcattccacctgatgcacacaataattccaaacaatgcctgcggctatccgcggggtggatgcctcaggagacaccactccgatgttcgggcccctatggagacgggcacagtatgtagatattcgttgcatatgactgtcaaatgaagtaaagggaacataaatgatattaattgacattggcaatctgccagcggtatttcaatttcatcatcaagtcacttgcagatcttcacgccctgtggtcgacaatatacacatcacgtgactccgctgtcggcgccgaaaaactcggcgtcattgacgggcccatttgagtcacagcatattccccattcttaattggccttcttttctcttttgctataaaagattccccgtgtccatattttggaagccattttctgcttttaatcacatcaatatcgagtctgcttggctcagctataacgacaccctaccttttatcgtctcttatccacttgtgcccccgcggtgccccgccaacactatgccgatgtatgttgcgatgactccaattcggtgttcctacatactaatctcttgaaggctcaaggatccctcaaaaaagtacaagcccttcaagccggtaaatctgccaaatcgccaatggcccaataaaattattgacaagcctcctcgctggctggcaactgatctgcgtgatggcaaccagtctctgccggacccaatggtatgatatgatgtactgcgctcaatgctgtttcccatattgattggattggatctataggacggcgagcaaaaataccgtttcttcaagatgctcgtggatattggttacaaggaaatcgaagtgtccttcccttccgcatcccaaacggacttcgactttacccgccgtctggtagaagagcccggtctcacacccgatgatgtcgccctgcaggtcctggccccctgccgtgaggatctcatccgtcgcacagtcgactccctgaagggcgccaagaaggctatcctccacatctacctcgcaacgagcccctgtttccgtcgcataatcttcaacatggaccacaagcagagtctggagatggctgtcaaatgcacaaagtatgcccgctctatcaccaaggacgacccctcccaggccggcacagattggcaattcgagttctcccccgagactttctccgataccgagcccgagtacgccgtggaggtctgccaggctgtgaaggctgcctggggacccacggaggagaagcccatcatatttaacctgcccgccacggtagagatggccacccccaacgtctttgctgatcaggtcgagtacttctgcacaaacatgactgagcgcgagaagtttgttgtttcagtccacccgcataacgaccgtggctgcgctgttgccgccgctgaactggcacagatggctggtgccgatcgtgtagagggtactctgttcggcaacggtgagcgtaccggaaacgtggacctggttactctcgccctgaacctgtacacacaaggtgtctcgccaaacgtcgacttctcggacatcaactctgtcatcaaggtggtagaggagagcaacaagatccccgtcaacgagcgtgcaccatatggtggtcagctcgtggtgtgcgcattctctggaaggttcgttgtcctttctttttcctacgttattcgctttgctaacctatttcgaatccagtcaccaagatgcaatcaagaagggcttcaaactgcgccaagatggcgagggcgccgacgaggaaaccgagtgggaagtcccgtacctccccctggatccccaagatatcggccgtacctacgaggcagtcatccgtgtcaactcccaaagtggcaagggtggcgccgcctggattatcctgcgaagcctggagctggatctccctcgcgctctgcaagtcgagttcagcaagatcgtgcaggagaagaccgaggctgtcagccgggagctgaaacctaccgagatcgtcaacctcttcgaggaggcctaccacctcaagtcaaacccccgcttcacccttgtcgactacagcatcaccaccgaccgctcgcagtcccctgctcctcctgagcccggcaaggccctcaacaccaagaacctcaagcgtcgcttcaccggtattatcgagatcgacaatgttcagcatgccatcaccggtgtcggcccaggtgctatttcctccctggctaccgctctttctaccctcggtattgatctcgatgtccgcgactacaaggaacactccattggtcgcggtcgcgacaccaaggctgctacctacattcagtgcacagcagccggcagcaatcaacaggtgtggggtgttggtatccaccaggatgtggtccaggcctctctgattgcgctgcttagcgccgccagctcggtaagatctgttcctgatttgtctgcatctcaccactaacatgcgtttagttcctcacctcccgggctggttctcctgctcctttccgtcccatccgctccaacaccctcaccaacgaggacatcgaagctctcgagcagttgaccagcattccagaggctgttacatctaacggcggtctgagcgccaaggccaacatcgaacagctgacaaaaaaggctgaaaatttgtaaaaaaaagtttaagaaaagcaaccgactaaaagtgatagcgataatgtgaataccatgaacaatttgaatcaatattttcttcaaggattgctcttcagatgtaacattgacttagctgaatatagtagagttgaaattcgtggtcattggctagttatgcatatccaccgacattttcactcatgtcaagctataaaagaccagagacattcgagctcaccacccaaacaactcatccaaactccatcctctctttgcactggccccataagcattgaacgtctgcggcccctcagccgaaataatatacccattctcacaagacgagaacgagaccttcggctgattcgcgtagaaggtatcgaagcccgagtccagcgcatcagcaagactgttcactttaccggctgggtgtagctggcgccaggggtatcgacatgcgtcaccttcgcaggacttgagcactagcatgagtgcgtccaatcgcgctattatttgtggcagctcgcgatttgcaatcttgtagttggggtgtttggctgggtatgtgcctaggttcacggtttgatggggatcgctcttttttagagtgttaaggcttgttgaatatcctgtgggatagaaggggatggatggcttaccttcagatcgaagaactctttctcgtttgtgcaccatactgcatagtatagactatagtcgtcggcaaccagtcggatacccttgtatgtgtttctttggtagctgttatgtggctggtcgagtttgtcgctggcatacccgtagatcccttctggtactgcctatcttgatgttagctggttggttaatatgtgcttgctgtgtgaattactcactaatccccagtattcaatagcaacatgctccgtcctattgtctgccgtgctggcagcaatggtagtagggatagtcttaccgtccaatccgtctcgagtaacgccagctatgttcaagaaagtaggagctagatccgtatgagaagtgatagcatccagagtctgattctttccgataccagggcctcggacgatgagagggacgttgatatcagtttctatacgagttagcatatctatacaccatagacaatcaagacaatcaagaccaactcaccataaccacagttcttaccaggctgcatccgatgctggccgagatgatacccattatccgtcgaaaagaagatataagtattatccagctccccaaccttttccaacctctcaacaagcctcccaaccatctcatcaacagcctgcaaggcccgcagccgacaccgctggaactcatcaatataatcaacattcgtctgattcaactcaggcacattctgcacccagctaacggcattctcaatcagtgtattaaagctctcatcgcgcggcgcctgcacatcctcaaacaaacccgcatgccgcggcgcaaactccggctcaccgaaccagttcgcgttcctcgtggaatcatgagacccattcgagtgtggcgcgttgggcgctactgtcagcatccacggctgtttgtgcttaaccgcctcgtcgatgaaaccctctgctttttcggcgatcacgtctgtcgagtactgcccgtcgtacttgactggtgctgcgccgttgcgcgtcatccgtgcgtaccagtatcggtatgtgtacggatctaggaggaagtccgagccgttgaaccctcgtacgtacggattgttgtagttttcctctgtgtgtgcattccacatcttgcctacgtagtaggtgttgtagcctgcttcttgcatccatagtgggaggtagttgtcgttccagcctgctgagactacttttggatagccgccgtaggggagtccaacgtcggttacgttcgtgttgtgtggcatgcgaccggtccagaggttggctcgggatggacagcatagtgcgattgagcagaaatgtttggagtagcttgttccttgttgaacgagagtttccttgttaaagtgttagtctggggagggagaaagtagggcttgtatggaaggaatagacccacctgcaacttgggcatgtgctctaaaccgcccacatatttaccctgatcatctgttagaatgaagagaatattaggttgcttggcgacagctagagttgtcaagagcagcaatctcagtacgttcatcgctgcgaatttggcgttattgttgagcttgagagctgggaggatctatataaccccggcttagctctttggcttctgcaagccctgcgtcatggaagagacgtaaagagaccgaggagctgttgtgtgatttctccatataattgcatattgtcgatcatccgagtagaaatcgtaatgctgtacaacgtactccgtacatgatcggcatgtcagtgataggttggaagtaacagggaagtcgatcagtcggagtataaaaagatcggcgattgcgagcttgtgcacatcaatggtgttagggtgggtcgtatcctttagtctagtacatatgataacgatcaaccaaatcagaaatctgatctacaagcgtcagaaagatatactgggtatgtacaaattacaaacatagagctaaggtattgaggataagccggataaagaacaagcaatgctagggggaaaagaagatcagaactgtcaagcaaacacgccggccggcttttaaaaaggtatcatttccaatctgtacaatgtacgggctcaatccaagttcaagcctcgtagttgccgatttggcggtgcagaattgtcgctgtctgtgcggccaacgtcatgcccgtcttctgcgcctagtgccgactggtacatgagagcttcttggggccaatcattgaccccactgtcctgtgtgcttggacgtgccgtctcagcagggggtgtgctagcagcctgggggctgttggggttccatccctgttggctaggaagcggctctcgtcccgtcgagggccgttcatcgccagggtgtccatacgattgagactggtcagggttgtcggccatatcaaaactgaaccggaaatcacggtccacggcggacgtacccgcggtgggatccaacgtgttgtagtgttgatcatcaaactcggctacgaccgtggcagactgtggctccttgatgtgaggcacagcagagctaggcccggggataggagtggcaagaggactattgtcagtaacactccccagttcatacggcacagacccggcttggccggtctgataagtagccgcgggatgactggtctcttccaatgtcaccccacgtagagagcgagggacatttgcgtcgatatccggattcattgtggactgtcggatgctggtgcccatggtgcttccagccttggaaactctgctcatccggtgctgaggtatgtccgcaaatgggctatcgccctccaggtcgcgaatactgaactgagcaatggttcgcagcttccgggttacccatgaggcgagaaccttgccgcgctgcttctcgcctagacgagagcgggggaagtcgccgtgggagacgaatgcgacaatatccgcaacgacttggtgctccatgaggataacatcaacaatgacggggaccagggccgctagataggcttttcgggtaacttcaacgacaacaacgaccaagccaccggcttggaaaatagcactgagaatgttagcctccaggtcagatctcaatagattatcatctacttaccatcctccattcacgatattgcggtggcaactctctacggagttttcaatgtccatagggaagtgattgagtccattgacttcaaaagtttcgccgatactgccgaggaggaagaggacttgcatatcaactggctggccgccaggaccgatcggccgagtaacggtgtgaaggaaaccaagatcaccagtacggacataaggcacgctggggtcaccgtctgcaactctgccgttcaaccgctcggagtcaaattcttgctttgatttgtagaacccctcagcgcaagcgtcggactggacccagatctcaccgtactctccaacgtgcgagagagtgcaggtctccgggttcacgatcgcaatctgtgtgttaactgggaccatgcccgaatcctgcagcaaaagcgcggtaggatcggcatcggggtctacggggtaaataagaccttgacggaggcttcgcaagtcgagccatagttcgatcggctcaatgcacatgtatgatcgtgtggtaaccatcgggttgagaacgtgcgagtaaatgacgttgatcgaggtacggtccaagctggcattggcgaaatgtaggcgtacctttccatctgtataatcggattagcttctcttcatggctctgatggtgacgacacatacagagatccgttctaggccgcccctctgcggaaatcatcaggttcttcagttcttgaagctggaagccttttccagccatagcactcattgcgtaatccaacatctgactggtggcgtaagtgtccttgatcttgtaccgagcaagggttacgaagagagtcaatgggttttgagcgaaatcgactggtgaaactagatatgtaggcgcacctgaataatatgttagggtggagatgttcatagattagcagcaaacttaccgacgtaaatgcccatcaagcaggtgtggaggaatccgagacccagggtacttcgaacacttccaagcaccggccttgagcttgtcatttggcaggtttctttttgaaccttgcacatgcccattatggtttcatgggaaatttgcaccgagattcttcgctgatctggggtccaataagtccagaccatagcaggctggttaccctggagccaagtatccttcacagtgtagccgagctcgcgacatccgtgggactgcttcgagggctttgtggtattgtatatagcaggaacaccaatgcgaagaacctgggcggactgcttgatatgctgcgacacaagcttctgcctcatgacatggtcaacatcgttattgacaatgatggccttgatgttgaagtcgccgatgacgtgcaagaatgcaggagcatcctccgaaagacggttttgatcaataggagccatcgggatgacaacggcacccaagcacagacaagcatggacggcatagacgtactcttccgagtgggtgtacatcagcacgagatgatctcctggtcgcaccttcaccttgttcttgaggtaggtcgccaccgcagaaactttgaggtcaaacttcttccaggtgacgccttttccttcctttccacggctatcgatagagcagtaagccaattcttcagcttggcgagcgactcgccattgaagaaggtcgacgattgtgttaaagttgttcaatggggtggaagttcggtcatccatcactacatcgcgataatccacacccgaatattgcttttcctggtaggcaagcaagtcttgtcgtgatgctagagcagtgggggaccagattccaccctcaggatcaacaccgacgggcaggttcatcactgatcgttcaactccaaacttaacatgcactgcttgcagcataccgcactcgaaatctttgcgacagagcatgttgccaatttcttgtctgccattcttggtaacgcgcggcagactgttcggggctgtaagtagaacacagtatacccgtagatgatgctcttggtatagtacctccatacacctgtcggcgagcgaatcaagaagaaccgagtcgagctgccttggcggaccgccggaagttgttggcgccgttgaggccgagtaagactccaaaataatcacaggaagatgttcttcgttaacaaacacatcgaacgcagtacaatcatgaattttcggcaccttcttaagaatgctaactgttagatgttgaacgaagaagtatcgatgttccacaatctcttggccgtgctcaacccattcgactttttggcggagacgatcctcgtagagaccaagcacgaaaagtcggccctcaatcacacatccaagtagaccagtgcgcaggaattcaggttccacgagtatcggggtcgggttaggctcctcgaatttgtaggggcgagcgtggaatatggcctctgtgtgtttcggcaatgcccagaagccaccagaaagagagggtgaatcaacccaaatctctccaataacatttggcgtacaaaggagattggtctccggatcaacgacagcgagagttgcgtcaggaattgggtagccgaaagcgccaacgcgtacagcatgcggcatactgctggcatactttcgtgcatcctcgcccatggctagcacaaccacttcattgctctttaatgcctctttgtctagaagcacctcgctaagctcgtttttagggctctgcttgatcgtagaaactcgtgatccaccacccagaagactgcttccgaagcccgttttagtctcagacttggtaaggctctcgtcctctttcttataatcatcgcggccggctgggtccatttcatgggtcaaggaacatcccattcgctcttcaccaccgagccagtcacgcatactaatgaccatacctccatgctctggtaagcagagcatcggagccacaatttctctagcccgtgggttcctcattggccgaagccatctgtctgccaggatttcatggaactcagggtcgagagtaagtgtatcgatgagacagagtttgacgctgctgaaattaggttccgagtttttcttaaaatgtcttgtggccatcggatcttgctggtagttgtaggtggcgatcttcaagccagagtaatcggtcgccatgactgatgccttgtatttggtgatgagatgggcatataaaccgggtgtttccacagcccggtcctcgtgccaaacggttgtatggccaccgtaaacggtgaagagaatggccatgatcataccaattccttgtctcggatcgaggtaactgatgatcgtctctcccttagtgctatattgcctagcgcttgactccacaggaactgtagaaatgatcgcactcagacatgccatttgatgcatgatagtccggtggctcatcacaacaccacgcatatcacccgtcggggccctcgcaaactcaatataggccagatcggggacctgcagcgcaggtgtatcgtccttcttctttggatggaaactgccgaactcattcgtcttccaccactcgactcctcgtggccaactgagtttttgagctgtgatatcgcgttggaagttcttcaggttattctcagttgtcaatgccagatgtgcctgcgttgaggtgagcacaatatttagacttgtgtaatcatccagactgttgataggcacggcgacaactcctgcaataaagcagcccaagagcgcgacagcgaactcgataatttcagcttcgcggtagatgagagcgacacgatctccgcgatatagattactcttatcgcgaataacctgagcaactttctcggcgcgactagacagtttttcccacgttatcgatgcaacctccttgccctttgcatccagcacccaatatgctgcttgcttggggtgagcccgagcacgatgccgtaacaccgcgggcaggttgtcaaagttcgacatggggacatttttgtcgtgcggatcgttcaatgagaaaggaatctctcgaggttcgaggggaagtagatgctcaatagccggtccgtgctgaagttccgccccagcaggcatcaatggcggggccatgtttgctgttggcgaaaaggcttccccggactgagaatagcggtggaagccacctccatagctatccctataatcatcatgctgttgccccgcaaagtcggaaaagtagccctgctgggaatcaagcatcgtggactgtcgcgtgggcgctccagatgctggatcgtaatatgccatgccctcgtccgcgtactcaggttcggcgggggtatactcctgaggatattcctgagcgtactcctgagggtactcctgagggtactcctgagcgtactcgggctgagacatatattcgggctgagaatttggattgaacgcgtagttctgactcattaaagttgcggttctggaaccatcctggccttgtaaccctggggctgggggtttaggaaggaagagggagtcgtaagagctccctgaaggcgcgcggtcatgagcttggagcatgctttctctacgatgagaccctagcgatgcatgcgactgatcctgtgtatttataccggcaccttgatcatatccgacggctccgctgccctgtgagccatgactgcctgcgtaaatgggggaagtgacgtgtggcagggaagaatcggcagttggtgggcgaacgctcagaatggccggcgggacccttccagggctggttggggatgcatcgtagccaagaccggcctgtgaattgatatcaaggggcttgttgggaccgaaatattgcgaaagcaggatcgtacgtcgcttctggtatcttgtcgttgtcagtcctatgcatctgctggtccagaaatctctgtcgcaagaaccaaatctatgacaaggcacaattggcttgtaatactggttgtagccagggatagcttaccctttttgagtgatatcgccctcctgtcatggatcatacataagaaaaagcatacaacaagtgcacgagatgtacatacctccaattcccgatctaggtcccgcaaagcggcctgtatctcgggagactcttccgccatttagatggagggtcggaaagcctcaattcggggaaacgtatcaaaagcgcgggggagggatggggggcacggagtcaagaacacctcatcgcaatgagcgtctcgagggcgcagatgaggggtggcggatttgccaagtgcagccctgatagccgcaggttgtatttaccggggtgtgagtcgatcagcgagtcaatccgtcctgtctctgatcttcgcgcaagacacccgcgcaacgtcacccgccaaggcggtcagacgagccgagagcctgagacatgcgacggagagactatatatacccccagatatggttgtctcagatatatatagaaggtgacgagaaaattctacatctataccatcaagcctactgcatagagttccgatgaaagttgtggctgttcaggtactgtctgacttggtgtatcgcgtgtcccagtctaggctcggaactactgggaatgagacaccaagttacaccaatttggggctaggttcgtgtgttcagtggaggattttggcttaaattgaatagatgtaaatttgatatggaatcaaagcccaaaagtattcagtagaatcagtagacagtcagtgcgatcaatataaggctgggattatttgggtgtggatcgtcataaagtttccttcctcaggcactgaggcaccgaggcatgaatcaggtgatatccactatcagcctaccctaatcacatgacccccgcacaacctaagcgaggcacaccaatttctttcttggatacccggaacctcatcgacgttcaaccaccaaacgacaacccggtcaatttcccacgaacccctcccgcacagtcaacatgtccgacaacggggacgtcgaggtcgccgccttccctgtcctgcccaaggaggttctggccgagcagggcagcatcaagctgttcaacaagtggagctacgatgatgtcgagatccgggatatttccctgacgtgagtctttctatcaggtcctctatgcgccgagtgaattcctgttgtgtgcgagaaaagaacgagtcgaattggtggaatggcaagacttcgacaactggaagggggatatcgaaattctttatcggaggggacacaacacggcttggaactagttttcttttcgcacacagcaggaaatcaacagcgcgcacaaggaccggcaatcgcgcgactatcaggtttacagaggtgctgacccgccatgacagcgactacatccagatccgctcccccgtctacctctcccactctgccggtcgctatgccgccaagcgtttccgcaaggctcagtgccctatcatcgagcgtctcaccaactctctcatgatgaacggccgcaacaacggaaagaagcttctggccgttcgcatcgtcgcccacgctttcgagattgtatgtgccactccgaccaattcaaccattcaactatccaattcagacgctaattctcaattctacaggttcacatcatgaccgaccagaaccctctccaggttgccgttgacgccattgtcaactgcggtccccgtgaggactccacccgtatcggtagccagggtaccgtccgtcgccagggtatgtgaaaaagtcttgtctcgccatgtctggtatcaaatactaactcccttccagccgtcgatgtgtctcccctccgtcgcgtgaaccagtctatctctctgctcaccatcggtgctcgcgaggcctctttccgcaacatcaagagcattgctgagtgccttgctgaggagctgatcaacgccgccaagggttcttccaactcctacgctatcaagaagaaggatgagctcgagcgtgttgccaagagcaaccggtaaaggggttgtgttggatttgttctccgtttggtcctctgtctgcgtatactggagtggacggggttttaaccgggattcagtggattcgcatgcatctgcaaggctgtacataatgtgatacagtcaaggaggaagcacgatcttaaaagggaacgcattcggacggctttctttgtagttgtgatgcgatcatgaagaccttgggtcgtaaagacctatttcctaaaaagaaaaaatttcttttattctcgtttttgaatggatctagcaagtctagcatagagattgtagaagaatatacgatcaacatgatccaatgtcttaatgtttatgatttgatagttctagccaaatcagatattgccaaggttgagatttttcatcgcttatcgatacggcgaatacggagaaaaaaagtttcggacctccaacataccctccccaaccaccacattcttattttcaactccaaaaatggtgaaaagaaagctgggagccttggaaaaggtcgaggctgacctgtacgtaaatgtctgacccgatgcgccctgatcaattggtcagaggcttcagtccgtgatgctaacatcttttttttgcgattcgcaggcccaatttgcagcacaagattcgcagagatcctaagtaagttatatgcagagttccctatgctattttgtacacggtcggggattaattatcgctttgcttttcaggtcttatatcgaggattttcgcgcccaacattaccaatatgaatcccatcgtgagattttcatggcggcgcctacatctgctacggacaccggtctgatttctcttcgggatctcattgacttcatctctcatgtggccgactgttacccgggcatctgtaaggatttcccgcaacagctcattgatatgctcatgcagcaccacctggtattggagacagagttgcgggagaagctggttggaagtttagcgcttttgaagaagaaggatcttatagattcagcaaagtgcgaagaccctttcattacttccctactttcgatcctaaccactactctaggctacttcacactctcttccccatcctcatctctacacctagcaagaccctgcgggctctgctcttccaaaagatcctctctgagctacgaaccgcaaatgcaaagaccactaaccacaagttgaaccggactatgcaaacagttctattcaacttggtcacatcagaccgcacatcggctaaaggcctgtgggcgatcaagatcaccagagagctatggaagcgccaaatctggacggaggctaaggccgttgagatcatgaaggaggcagctttgtcacaaaatgagaaggtcatcatcggtggagtccgtttcttcctcggtggcgataaggagcgcgaggaattagaggacgaagacagtgaagaagaagtcagtgttggccaggttaagcatcaacttaccatcaataagaagacccgaaagaaggcccgtgtcgccgaaaaggccatcaaagcggtcaggaacaaggagcgcaagaagggaaatcccaatcctctcaacttctccgcgcttcatttgcttcacgatccccaaggattcgcggataacatgttcttcaagcatctccagaacagcaagtctaagttgaatctggagcaaaagcttcaggtgctacagctggtctctcgcctggtcggcttgcacaagttgcacatcatgccgctctactcttacttccaaaagtaccttacgccccgccaaccttctgtgacttcattcctggcatctctagcccaagcctcgcacgacttggtgcctcctgatgttctcgagcctctgattcagaagattgcaaatgagttcgtgtccgaagcatctgccggtgaagtcgccacggctggtctgaatgccatccgtgaaatttgtgctagacagcctttggctattgatgagaccctgttgcaggatctcgtcatgtacaagaagagtaaggataagggtgtcatgatggcctccaagggtctcctcagtctgtaccgtgatgttggtgcgcagatgctgaagaagcgtgaccgtggcaaggaggcctcgatgagtttacgtgctggtgagagaccagagagacgttacggtcagcaggaggccggcgaaattgagggtctggaactcttggctaagtggaaagatgaggagcgtcgcaagaagaacatcgagaatggccttccatctgatgcggaagataacgaagaggagaacgacgaggccgactgggcagcctggaacgtcgaagaggacgaggacagcgatgtcgacggagaatggatcaatgtggaggaagatgttgacattgtactgagtgattccgaggatgaaggcaagccggcatcaaagaaggccaaacaggacgaagagaccaagaaggacaccgaaaaagaagccgaaaaacccattgatttcatgaaactggccaccacccgcatcctcaccccagctgatctcgccaaacttacggagcttcgtgctcaggccgcagccgaagccactcttccgggcaacaagggccgcgtcgctgccccatggacctcccgccataccgatgacccattgaccgctggtgagattgagggtcttgctgctctatctgccgccagggccactcgtgaggaacgtattgcccacgccaaggagggcaagactgagcatatgagtaaggaggctcgtcgcaaggaacgcaaggtggagcaaggaaagagttctaccaacaaggaaaaggctcgcaagaagaacttcctcatgacgttgggcaaggcgcgcagcaagaacaagagaagtttggtggagacccgtgctgtgcttcgggctcacgtcgatcgtggcaagagaggcggacggagaggaaacgttggccagtgataggctttttatgtccgtttttcttaaaaataatgatttgttatatacagtacattacttttgtcattgcacgaggctcacaggatagaccataaagagcatatactaccttatgacagccataaccctatcaatgattatactccatcgtataaagtaaagattaattaaaggtgctcgattggttccacgacgcgatattagtgggggtactatgcgttgatcaacgcgtaccgcgttaagtggcgtccccgttgcctgagcagcctcgtccttttttctttttcttcccttttcccactacactacgtcactcactcgtgggcattttgagaatactcccatattgaaatcgaaaaccgcatatcccttttccaacatggcacccagcaatagcgacttgtcaaagcgacgacgcttccaacctcctatcacaacgttcttcacatccgcctcggaaccagtgtcttcagctacacctgcggtgtcacaccaccaccattacgccgcagcaacattctctgcccacccggttgtgcctgccaaagttcagtcatcgcttctgtctgtcggaatgcgggttcggaaatccgtcgcagacggttatagaaccaacatgtccaagacagaagaaaaggccccactctcgacagctgtcggtcaaaccccgcgtgctcaaccctaccacggcagcagatactctgagctgtcacctttttccggcactggtaaatcctccagccacgatgactccctcgttaccgacgatggcgacgcatactcgatcccatcaagcagccaagactcggctgtgtcatttgccttgggcggtcaaaagcgggctttggaattagatggtgacattctggtcgatgaggatgttgatgaatcatccaacaatttcggatcctggaacgagaactcatgcggacgaaccatcctgtctccgaatttgggccaaagtcgccgtatccttgctgtgcgacacagcaagattgaacagcccattatggacatggatgacttcgaggaggctacgttcctccgccgccgtgaggaagttgacgcagaggatgtgcggatgtacggcgcttgaactgttagtttgtgcttctcatttcacttcccctacgagcccttccatggcatggcctactatcttcttgtttatccttgttgggtctggaatcggcttggtttcttttaccagacttgtattatacccactgttgttctatgttgtaccatattgtcttgtacatttatctttttccatctgcagagcagcgaatgtgacttattacgaatattagttcatactgtcacgtttgtaatcaactctagggtccagggagcacctgggaactattaatatcaggcatcaccgtcagtatggacttgcactgagattaagactaaatttaataatatacaaaaataacgcaaccagacaatgagactgagaaacatcttgtataagaggaacggccaccaaatgtaggatgtatccctacatcccgagttgtaatcccattattccaagtcaccaatgtcgcaatcttgcccagtatacacgcatcttcaaaaatctcgatattcgaggtggaggatgattatctgataacatcgaaatggtactcttcctgcgagtacgatagttgtcatattcgagaacggtaatggtacccttcaaggtagcgccaaatttagcatcaatgtcgtcaaactgccctgactcaatatccggatattcttccatctcttgcttgggcgaatgctgatgtattcgatatcgaacgagaggatttatccaagtgtcactggaggccatggtttgtgtgtataggtgtgttagagatatgaaagtgtgagaagagagaagagaagtaccaatattatgaagatacatccatatatgtactagtagctactagacttttgtttgccgattttgctcacggagtacacaaaagtatattatctcgtggtccatgggttatgcatagggtttcacttccattccaaggtaattgtatgtattttgctacatttaagtagttattaactaagatgcagaattggagccagttatatattcctaatacggagagccaatattcaattattgcagaatagcacagttagcaaaacactcatgcttctaattccaagctcatggccctgcaattactcaccagtcgactgagtcagaccccgcccacgccattgccattgcgactgaataatagttctcaaaagggaaatcaaatattgattggctacatgcatctgggaccggtgggttatgattggtagagatgagtacgtcatctgtgaggctctcgtctgggtccgctagtcccaaagaggatgccaatatgtgagcccccggactccagggctacagtgttccaaatattttatgtggtttcactatatagcgaggtagtcacacttaagagccttgcagcgggggtccgagtcgttgattttctggcaaaattagcgggccattgaaaaagagttacctgacaaaccaagccacaacccaggataactaacttacaacattcgcaatcatggacctttgaagatccacacaaggggcctgtagagatgttcgttaggtacattttgtgccagccgattggcctagagatgcctactctctgtattagatagttacctatcttaatgctcactggtattcaagctcgcttttgttaatcattatattcccgtttgataagaataggccttttaatacagaggtacgtacttatttcatccaaggaagagtagtgaatataatctacccaataaacgttggacaaagcctattagataccgcaatccaactttctgttgtcctaagccgactagagccagacctaggaatcgcatggaagtaggagacaagtcagttagaaccttggaagttagaggggagtagaagtacggagtagagcaagcgagagccctggaaattgaatatgtttgccttctaaagttgaagtcttcagaaggaaagagcgtggagattgtttaccgcctggtgactgtgtataagaaactcttaccactttcgcactttcgaaatccatcagacttacatacatatctcatcgacaagggttgagaggtaaggaaggtaggcagtcctggaaaacatatcatgtgatgtgaacatacgatgacatatgtctgtacgcataatggtcgatagatgtatcgagtctaaagtagtaatagctgtagtagccagattcttccaaggttagattcaaggcctgattatctaagcatcaaaatgacctcggcttcgcacagccacagtgccacagccacagtttctgatctgctttgaccgtaaaccgtggaagtatcgaagacccgcaattgtttcaggtccaaaaataacattgaatgacaatcagatctcagtactgccagaacccctcgctcaatggaatcgatgtggtcgcatcttaacagtgtcaaccatcaactcatccacctccttggctccatgaaaacccaacatggcaccaaccactaaacccaaagttcgcaaacgcaagccacgtgcgagaaagaagaatcgtggtgtccgcactcgcgaaggccatgcacgtccgatagacgcaggctcgccggcccaaccgcttgccgaagtactcaacgagaagacaaagcgtcgcaaacccaagaaaacatgggccgcactcattcctgtctccgatgatcccctcgaaagggtaagtttgagctgtattgatatagaaggatatcacgctaaacattgaatcagaatattgttgagcaagtacctttgccagatgggtacgttctagtccccaagggtgatgtatacatcactcgacactgccgcagtaagaccaaagagtccgagcgaatagtatatgtcgtctacgtaagcgctcattcgaaccatcagtttcaagcccagagaaggaccgctaacagccccagaaccgcacgggcaaaagaactctgggaatccgagtgcccgaagaaatctatacagaagttcttgaatcagccgccgcaacaaaagaatcacgcgccaacgccgtgcaagtgcgtgacgctaaggatctctccaaatcccgagaactcttgaagagtgaattcccgcttatgcccaaggaaaccctcaaaatcgtcctggaacatgccttcctcaagggatcggggcgtgtagggcggacagggatgatcagcgacgatcgaaagacgctattggctgtggaggcgcatattcgacatgttcatacgccgtatgagaagttgcttgaggagggcgtcagtcggaaggatgctcgtgagcaggtctggcctactatccaggccgttgagcggacttggcaggggtgtgagaagaggaagactacattggctttgcgtccggttgacaagtaagggttgcattttgttttggtgggattgaatgggaattgcattgctggagtttgttgtggagttattgaggctatgaaactatgagactatagtgtttgggatcactcgaaattcactgattactctattctaaccagtagcctaggtacagtagataaatatttgaggcctatatgatctacaggtgaaagcaaaatcactaagaatatcatttgtggctatccgtatgtaagaacgcggaggagaagcaggagcaaatccccatcccacttctcaccccaaaaagcttatgggtctcattgacccagtcacacagcctcaatctagaggcgtggaccacggaggaacttcacctcgaaatgcgggtggcggtaaggcagacccgagaaccagccgaagccgtcccgtatcatgtcctgcatgatacccattcgaagatcagcacgagcgagtgcctgatcacggctcgcctgacccgtatcaatacggatgtagagatgcggaccagctcgctcaggcagggactccagaactggcagtcccgctctctgaagacgagtcacttcagcgcgagcgacggtcagcacgtcgaggtccagagttggcataggacggggcccaatggagaggtaaaacttttggcggtgcatgccactgttctgagcctgctcgtttatgcgagtcagggtggtggttggtgcaggctgagcctgttggggaggagggctgccgatctccattggatcaatgtccattggatcgggcgcgggctcagattggtcttcacttgtaaaagtggcaaagcggctgctggccatgccaggtcggatagggttgcgaaatgaggtagcttggtgggcgtttgttgcgtccggtcgtcctgtggaatgccctcgggcttgcctaatttgtctggcaacttgtcttgagagcgcacccgtggcgctgctttggtcgttgttgtttgccatagtgctaaataatactgtcagtttatgcttgtctcatattttgctgattggaggtcagacatacgattgtagggcttggtatctctgtggaagagaaggcatatgggttggtacacatgatgataaaggcgaaccacagtcacaaagagatcagagaccatctaaacgagctcaaaagtactgtttctaagctcttgtggcacgtgatttcgaagctcgaagagtttacatgttttgggtgttgaagatgggagaatcgaggattctcaattcaaccagtactgtttgctattaaaagaattgaaagaacgaaagaataaactaaatagtaatagttattggcttcacgcgtttctaaatgtattatccaaataattaaattcgttgacacttagatgtatagaagcacgactatgttgtagccaagcttttctggactctcgtgccttatcggtttatagttcctgattgggagtgccaagacatacacgggcggtcagccccacatgcaaacaatcagggaacaaggtcgacggtgcaaatgttctctctttcttagaattggacatggatctggaatcacagacaacagacaagcattcaaatatctttacaaagtcctctttacctcaatctccccaaatatcgcaattaacaccagtgaaccccccaaactcagtttccagggtccatcgcagttacaccaatcaggcaaaaccaatgaaatgagaccttcccggggtctgtttgggggcttagactgatagcccaaagaaaattcacccctcaacggtctcttatttgtcatggctagtcctctcaccactcaccatgagaaatcgcgtgtttctggggtttccaaaccggcataaatatgtcctggtggctgcgattctaactctatttattcttttcaagtctgtgcccacatccaagctcgatccccacaccaagaagctgtacggggaggaccgaccgcggtatcttcaccagtctacatttcgcaagaacccagaccatgactacgagctcaagctctctaatgcgcttcgcgccatggagatagaaagggaaatgcgacacgatgaggatgcaacacatacactgtggcagattatgctaccaggagtcagccagcgaagcgacgattcaattcaattcgaggaaaagaattcagaatggaaatacaaagtaagaccgacaacagacaattcatatcttgattataccaggtcaaccgactaactttacaatttacagctgatagaagccgactgggctgacaaattcattttcgacactctggaatccatcccagacatcgctcgactctacaaatcatacccacactccgtccaccgcggcgatctcctccgctatttgattctatggtactacggcggctactacgcagacctcgacatatatcccgcacgaagcatcaaatcatgcccgtcactgcgcgactccatcttcaaagccaacacggttaacgcgaatgtgtcgctagttgtcggaattgaaatcgacgagccattcgcttcgccgcagaagatgcgcgactggcactgggcccgacgctacggcttcatccaatactcaatttatgcgccacaacggtttagtccgctactaagagagatcatcgtccgtgtgttgtcccatacgaagcagcgagtcgacgagggtcatttctggaataggagatacaacgaaatggatacgatggagatcaccggccccggcgtgtttacagatgctattctcgatgtgctgtcggatacattgccatctacacatcggttagtacaacagtctgtggatgcggacgctgggttctcgtcctcggcttcgtctgtgcagcgtgtgacgtgggcgcctttccacgggattcaagagccgctctgtgttgagagttcagagactcagcctggcaagctaatgggagggctgtgtgttctacctgttaacgcttggggtaatggacagcggcattctggatccgagggcttcagtagtcaacaagcttgtattaaccatcggtttggggggacttggaagccttggaaacagagctggcggaagtatctctttggctgagaggatatgattttaatgtttacatctggtgttccggggtgtacaggtcatggcgttttatggtatcttcctgattaatgctaccaatgtctttgtttctaatattgatatcccatagactgtgttcttaattggaatactattcaagttaaaacaaacttgattcctttattgcaagttgatatatcgaagttaacttctaacctgctcttataaaggtgggctggaagagcgaagaacaagtgaagaacaagtgaggaataagtgagtgatacctcagatctactaggtaccagctctggggtagtgtttactttgagataaatactttaataatggcagtgaattggaagaagcctggaaccacctagcaaacatttatgtccctctatattaacccactcattcccccgtcgcttttcccctgaacatcctctctcctcgttctcgcaagtggcaactgtcaatcccacagcatcaacattgcatccaatttttcgggaatgcccccaaatcagtcgaccccgatcccctctgatatcacgcaatggaaaaaagcagccaagagagcagaggccacattgaggacgagcatccacaccagagacccgttcaaatcaggctcttaagatattcgaagaggaatttctgcttctgagattacaaccaacagcaacgggtgaaccaattaccgtacttggtacctacgagtgaggagagggcctatgacaagaatgaggagcttgtgaatgcttcacttgtcattttcttacaagcagtctgcgcgaagcactccgatgtggatagtgacaggaatcagcgtggtctgaatcattgactaaattgaagcaagatgttttattctggccgaactagtcagaccaggaggtcaaagtcgcattaaccataagaatcgctcggagggggaagacgactgtcaccattgaagaatgggcagtcgacattggagaatgttcccccactcctacatcaccctaagcccgccaaacccttacgttgagaggtgaaggccagacattatttcccgcgcgcttccaatgctaatttcatatgaagcagtgtgaagttgcttaccttagtaaggcctcaagttaccacgccaaaattcgatttcaagaaggtcaagaatgacgaggaaaacggagagcttagatcggacatcttcagcttgtcatgccaggtagacggcttcctgaagtcgaagtcaacctttcgagcacaatcaatcctcgaagcgaaagctctaatgcgtgacaatcatgaactgaatgtctattggcaggagactatggaactggttacagccctgttaaatgcgcatcccttcccaaggacaggtaagcctatgcagtgatatcactgtatttgagtctctatactgatataactattagggtgacgctcttttctcagactggatctgagctgtacctgctcaacgcctcttacaaggacgggtatagacaatacatgcagggtgatccgggaaagcgctccttgaagcaagacagacttttcgcattgggataatatcgaatgagtctcgtttcgcctatatggtccatatcttatcactgaaaagacatacttctggtactttgccaggctagccctggccgtcgctctccgtgcaagcgaagaggaggatgcaaggacctaggggttcaaggacgccctcgcctctgctgcgagcgctggttctgctgccggcactggtgagtatcccacgacatattaatgttgtctatccctatataccagaagcaatactaatatcttccaaatagactcctcctatcacctcttccgccgattcccccagctatagctactccaatagtagctcttcctatcgtgtccccctccgcgtccagtaagttgaataccctcgcattccaaattccgagcccttcctccgccagtctcttgagaggaagcatctccactacagcggcagtcgaccaatataggccaactccctgtcatattcttttggcttgcaagttctgttaaggggtgacgctaatatttgaataaaaatagacagtactgccttgattgtcctcaccgtgggcctcgcccaccagatgacactcgcatcgttgattccgagattcccactaagtgaccaagaggcggaggaactagctagcttcctccccgagatcattaagaactttgttgatgaacggcggcttggccgaggactcgaagcatgggctctgtagccactattagctattttctttgaagatcattgaattctacatttttttttactcctcattgaagtaaagcctggttcaatgccataggaaaaattaggtgatcttgtcaggcaccaacttgaattactggtcaatcttcaacagttttacttttaacatcctgggacctggcagagaagctcacagtccccaataagtgcatttcaactaaaatacgaagtatagagagacagaggagcaaagaaaaacaagggactttggctatagtactaaagtcaatcgccttgtcattatagctgcactgctacccctaaactctttgggtatcaaatcggtaagcaagacaaaaacgaccttgtccccggcgagtatatcatataccttgtatgggaaaaattgcggggagattctcttagctcttaggagttctggagttctggagccttccctatcacacaattccacagtgtgatccaaggtcatttactagggtttaggcagtttatcaaggatgctccctggcttgaggaccactgcggatgctaccactcgctggaaggagacgttccttcgtattataataagtagtaatagtgaattgtggacacacgaatgaatattgatttctttgcctaggcccacaaatcctagggtacctccaaggtaaccctacggtcctggatgaaggtagcaataaaactgggtaaatacccagacaggtcttctacttcctcgtccgttaattccaacccggggaccaacgaagcaggagtgatacggtaggcagctcccaccgtggggactactgcactagtggtgcctatatttattcgaatattagcattgctcctcagcaagacctgcagtcgattttctactggagatgagatgcttcctcctaagcgaacaacggaggaaggggtcataatttagaatgcgagggtatacaacttactggccatggagggggacacggcaggaggatctactactggattcgtgatggccgggggaggtgcctgcgaggcaacagtatgggagtcggtcgaaggggaggcgacaggaggagcagtggaggattctccttagaatgtattagtattgcttctggtatatagggatagacaacattaatatgtcgtgggatactcaccagtgccggcagcagaaccagcgctcgcagcagaggcgagggcgtctttaagctctttggcggctagatgtactattagtacctctcattctcttgatactggccgcggcagacagagctcttacctttctccctcgaaagtattgctgtatttatgggtaagctttctgtccaactcgagtggtctcagccatgataatgtgagactaacctctgatcttttttcctcctcgggggcgctaacgctttcccacttttttgaactgtacgcatcaatgtatctccccatcattaaatcatctcaaagattgagtgcttacagtggtaggggcattggggccattggagacgctgggagcactgggagcgctggaggcgctgggggcagtggcctggcacggttgtcagtgttcattcacatattgagtgaggacatgggatgaccacacgacatggtcatcaataaagatgagacttacgggagtctttcttttctgagacatggcgatggcgagtagaaggaagatgataagatgataagatgataggagaataggagaagagggaaaaaaggaaaggaaagggaaagagccccagggggaacataggcaggagcactacacgtcttccttatctacgaacttcagtttatctgacgtcttgcacgacattaccttcaccttcccttttgggaaggaccgtgaagattctctccaccagtactaatacctccctctcccacgacgctcgctaacggactcgatcctctcgacctaatgtccgaacgaacgaactgcgaatgatatgttggagtggaggtacactacaatggtcgattgcttgagagcatacccgccgtagagccttgctaagtatgatcattgcttgctgcgcaatacagctcagctccagaaagaggtccgtgtctaggtataggaacactaggtagatctagctagatacgttgattggtcggtgttatgagtgttgcttgaagaatgatgtgctcccttgtagagccggcttttcattctaagtgacatgcagatcgcctacgattgatctcctcacagctaatcttcacgaattttcgaatatcataatcgtacgcttggactttagaacattgaggctcgctcatgtaggaatctagcgtaattgagtacttattaggagggcgctttaggttcgcaatattgcgcaataggattaacgttgtctttgtattaccagggaaccatttctaatctaatagccagaaatcatttttcagggtcaaggttttctttgtccaagccggagggagagcttgatgctgaacgcgaggagatggcgactgctcttcaaccagaacaggctctatttctggaccatctcgggggttgcaattgttgtagcgaacgaaaagctccatctttccatcgctatctacaaaattgtagatcggcgaggatcggacaagtaaggtaccggaattgtcgaactttgcttgtaggagacggccgtgccttggcccaaagagcgagatgacgagaactgggaagaatgaggtatctccgaattctggctgttcgagacggcagtagagggtgtttgcaatagacgctaactcgctatgttgtagttcattttctttagcctttgtaccagtgagagtcacaagtttgatgtgagggcgagtggtcttcggatccttaaaatcgtcaagccattggcggatagaatgggcggtccatctcggaacatcccgaggctttgaatgtccagctttaacaccgcataacattcctgttggagtatcgttgaaagaattttcagccctaatagcctatgttagcgacgtagtcattaagaatagaacgagactcacttgatattattccaatgcgaaaggtcctgtatcgaggaggtcgatcttcccctcttcctcttcctccccccctcctccctcccgtcctccctctcagcccgtgactcaaagacttcaagatagaaggcaatttgaccagctctctcccacatgaggcaatcctcgggaacatcgcctgtaacatcatgaaaagtgtccttgaattcgttgatatagtgatacccgtccctaggaagtgcttctttgtccattttgaatgtttcaagctcttcatgggtaagtggccggaagagacaagcctccgaatcggtgaatgtgtgatcctctggatcgatagactggacggagactcggaattgagctagctcagtatacgtgtaggtaggcttagactgagactggagcttatagacgatggaccgcactgctttcttgtacttgtctcttaggtgagcgcgttcctgcggatcaaccaaggaagaagccatggtggataataaggaagaaagggtaataatgttgcaacgtagagacagaaagatgattttgggggcaatgagtacgaaagaggagaactgattgcatcacaattgatgccctaaaactttaagttttagagagggaaaggatttcacgtgccagatctttaagagagaagaatgcattcaatacagaataactaagatggagagaaagaagaagcaagttgcaaagtgggaagcagtctatagaatacccgcaccgaaggtattctaaaagaccccggtcttgccaaagtccggatttttcctccgtcaagaacaagacaagaccgaagcccgccactctttcaggaataagaggcaaaccgacaagaatctaggttgctccgtcaaggacaaggcaaagccgaagctcgccaccctatcgagaatatactaacaacaagtgactccgtgaaggacaagacgagccgaagctcaccaccctttcaggaatagaccatctcatcaccccttcaggaacaagacaaagccaaagctcgccactccttcaatggaaagacaaagacaatcacaaatcgccttcttcgattaaggaactgagatttcccctaaaaggcaaagtttgcaactttttgggtgagactgaccgggtgggagatcgaggagacacattctatcaaagcatgcactctcgtttgacgggtgatcgcgaccctgatgggactgaaaaggacccaccgtcagaatcgtcaccactgtcatcatcctcatctgctcctccctgcatcgcagcaatgcgggagaggtgccatctcagctccaaaagttccatcgaaggcaatggttgtttctccttgtcgttagttctcaccgtgaagacatgccctgagctaattacttccaaagtttccatatcgaaaaagtaattaaatctcccggggctcctggacggtggagttcctggacccatgtctcggactgcggcaggcggcattcggtcattcctagcgatggtggcgcttcggaaaggaagccaatgaaatgcgattcgcatttcagtttcttcttcgttgaccgaaattggccggaatgcaatgagtccgcggtcccattgatcgtgagctgtgagatccagcgtgatcaggttgcatacccgctcagtgctcactagcacaccacctggcatcagggcttgctcccatgcatcgaccttttcttcggaccagaaggtgcgaagaaagttccagacgctgtttccatcatgctcgtcccgcgtggtcccattgatcctattcggtataatatgggctacctcaagcgatggtcctccacggcgggtcagaacgcatctagcctcctcacgatctgtcactgtcaccctaatgctttcctcggtctagaaatcaaagagatcagcagtgttccataataaatactcctgacaaactcactgggtcaccaagtatcctctttcgccgaccactggcctggggaaccgggattctgggctctgaccgtaaacgagcggcggtactggcttgtgccggagagccagatctaccactatcaccacgttcagggcgtcggctcgagatgtcagcagcggcactcctctcgccgcgtgcgcccatatcgggtctggtttccagtaccctgggttggccagagcgagatgcttgtccatcactggcccctaaataaatgacagatattagttcagtgatataagggcagggcagacctcgtgaatacgcacaaattctcggaagattgtattgggagaaatcaaccagcatgtatcgaagcatgtgtgggttccgctcgtggcctacaaggacctccagggccttgatgtcagcgaaccatagacccagcgccttcacgcgtgggatcctgtggttgccgacagcgacacagatacgatcaatcaacgatcgtcggtggggatccgaaaattcggaaaaaatggtttgagtatcgttgttcatattatgtgattacgaaaagatgagagagaagagagagaagagaagagagagagagagttgaggggaacttctaaggttgaaagctactgcccgtttgggcgtcggggtgtatctatggatgggaaagaacacagtcgttctttccacttcactccacccttccctccatttacccaaagtatacaagaagaggagccttgagatatggcttttgttcaaggaaccagaagttggtcccttcaatccattgattttaaaagaagaggtagtctaagtcaggcatttcaggaatcgctagccacgtttttatatcgtgcacactcctctggcttgttgttccaagtcggcttgcatagcctttcgcgataatctcactattgacttgagtacgtttctctctatgatgtaatttggatctcctgggctctcatacttacagacaccgtgatgatctgcatttaaagcccagaacagaagaatccttttccaaaatcatctttttcaatcagtaaattccatgcggcgtataagaagatttgaagtatatcttaccacacgagcacttttgagcctgagaaaagtgggctaggttttataaaataaaacgaggtctagctttagggcgatatatcgggactgcttattaagcttttgtcgagtaacttagttttccaatgcggatgcctgtatcctgccttatttgactggcgcattttgagcaatttcatttgaattcacaggggacacaggtgactctcctggttcttgattccggaccatttcggaggtgaggggtggatatagtcctggggcttgggatgcggctcaacagtggcacatcgatgtacggagtcgatatggaccgtaccaaaggggtctgtaaggagcagactgggcgccattaatattaagcaatattgtgccgccatttcatctcttggcatttggccctcattgataaacagcctacatgaggctatacttgagaaagggatgatcgtcgctccaaagcgcttcaagagtcttttccttcggggtatttcggacatttaatccgaatggataatcttggagcggtgagagagatatgtagaaggttagcttcctacaaacgatcgagatctgagtctctcgaagctgatgacgaagatgattttgattacgacgctgctattgctagtctagcatctagggactagatggaatttcgcgcgggggatatgttacgatcgctatgtttgtttgcatgtttgttgtttgcagagtgccggctatataagcaggccctctcccacttctgcacttgcttcttacttctttccttctctttatcttagttattttgaattgatgcactctatgagagagaagagaaagagttattaaaagagtcttcggcccaatagcctattagtaatatcgtaatcaagtaactatagaacgagacttacttaatataacgccaatgcgaaaagtcctgtatggaggaggtcgatctccccctcttcctatcagctctcgtccacatctgggaatcctcaggaatcctatctgtcacgtcataaaacgtatcctcgaatttcttgatacagcgagactcgacctcagaaagtgcttctctatccattttgaatgtttcgaagctcttcatgggtaagtggctggaagaaacaagtttcggaatctatgaatgtatgatcttccgggtcgatagattggacggacactcggaactgagcgagctcagtgtacgtgtaggtaggcttagaccgagacttgagcttatggataagggattccactgcttccttgtacttgtctcttaggcgagcgcgctcttgcaggtcaatagatgaagccatagtgaatgataagaaagaaagggtgatattgtagagacagaaagacttgaatgatgaaagactgatgaaagagagttagctactaagcctaattaggaagtcgtagctccgaatataatgagcccgctcaataaaagtatagtcaaaagtgatatacatttaaatcctctagctataaaaatgaggagggaaaaacgatatctgaaaagacaataacatatgttgtactttggaaccacgcactgtgatagtaatgtgcagggacgcgctaaaccagaacaggcacgctaagctcttttgggcaattcaccgtccgagtgtacggagtacggagtatacaatatagacaacaagagtcaaagccagtctgagtatagggaagaacatggagtagctgatataatcttcgggcacaaagagataccaggaaggtttgctagggggtttagctctccaaaccctaattcacccttgaacacgtcggacctccccctttcatccatgaggtggttctcaaagtgggatatcccaatattacattctgatattctgatattctaaagctatgaagctctaagctccaatatcgaccccatagaaagtacaaagatatgtatcatatccggagtctccacatcttacatgtcgtcattggtgagattggtctttgatcctaaacagagctggaccggcatccccgacggctcaatctcgcccaggcttgctattataggtcgagatcggcaaggggagagtctgactttgaccttccaaggcgctggatgtatgaacatgatatatgagatgattcacattcttttgttcctgcatgaagcacaacatacattgtattccatactccctggacttcgaatggaacatcgaagctgtggatcagtggattctaatgaaaaaatttaataaattcgagtctccacgtaaagaaagaaaaagaaaagaagaaaaaggaataaaaggaaaaacgaaatttcttccctgaaagaaaaaaaaaggaatccgacaaacagagcaaatcccaaaaaacaccttcgctcccctccgactctccttccgatatcatttcccttactctttgccaacctacccaacacacaatatgaattaactccaatgatcctatctgctgtccccaattcctgtcattctcaatcaattaaggttgcctggcagcttgatcttcaatggttactgggtctgtgttgctgacatgagttgggatcaccctgtccacaggtatgcattctcccttgatgacacccccttgtgggggtatcacattgtagtcctctattctttttatttttacaattctgtactgtatgcctatgtgacaaaaccgctcatggattcatttatgtttagcttcagctatcccaacggtgaacctcaaactccgacgaggactccgaataccttcgactcgtttcacaccccgaaactcgaatccagcttttttgacccccgggtgacttgggatacctccgatccttatgcttccagcccggagctcctccgcacgccgcagaagtttggtctaggctcgaattcactgaaaggtcacaatggggagactactggttacagggggaggtcctcggaccagaccgatacggccagacggattcgcccggtgaagcctctgccgagtatgggcgaggattaccctcggacaacgggatcggccaagtcagcagcctcgatgcaaaccccgccgccgacaagtgcatctagacgaaaagtccccgagttggatcaccccgatggacagacacaaggagaaacgccgggcatgggaggtcatttggaaacacccagtcgtcttcttggagcatctcctcggatgtttggcaacctccaatcctcgcccgatttgtttcagctggcttcattggatcccactggctcgcctttcttcccacagcaacgactgttctgggatcatgatctagaaaatacgagtgaggttcctttgcccagcaacgggaacaatctcaatgctcgtcagacttccgtttacccacaacacatcccccaattaccaaccattggttcagttgatgctcccgactttggcaacggttttggaatgtcagcaccacccaccgatgctgccctatttcctgagccattctctacctctccccggctcccggtcaccaaggctgaggatccagctctgtttctgagttccccagctcggagattcggaggtcctcaacttacaccagagacacggtctcttcgtggccttcgacagccctatcaccaccaggcagaagagtccaggcgggaggagcttatccgagcacaggcacccaatggccaccgatccgatcctttcacggttttcccgggcgagagcgaggaggaggatgacgactacacacccaggggaatacgaccagttctaacccgcagtgcgacccaccatggcatgtctagctcatcgcggccgcacagtcaagccgggggctttatggcatccaccaacggaatccgaaagagcccaagtaaagggcgttcgtctccagcaaaatccatgcgtccagcccccttgacacgatctagttcgacagccaccggctccttgacgcgctcgtcatctgtggtgcttcgcattggacgagatggccgtgcaaaggctgaaatggagcccctcagtgaggcccccacagggttgaccgatcccctgactgggattgatctggatggctcttcaaccgagagtgaatcagatccagctgagttctcggaatatcccgtgttgcatcgcgctcagtcgtcattttcactttatgatatctcgaggcgtccactatcccggagtgattcgggctcccggcctctttcaaagggctcctatgcttccaccgtcggctcatcacactcgggtcggatgtcaccctgggctggctcttctatgggaggcgggcgagcaacgtatcgtggatctcctgatattaagcggacacccaaacggcattcgtctctgctgcactcggactcggcatatactcggggtagcgtggcatcagacttgttacccggagaggatgacgaaagtggtgatgctcaatctgcgcttcgacaggtcctcaaagaacgcggccggggaccaagatccacgaacgcgtttggtaaccgactttctcggtcatcacacacctttactcatctccgctcatcaccaccccgccttggcagtgattttgacatacatccccgtcacaatgcttctcccacgactttgaccgaccccgatcttgcaaccccaggcacagagcgtcacagcaaccccagtaacggtacacgatgtgtctgccgctcgatggataatggtggccatctcatgattcaatggtgagttcctccatcggccttgatttcaaagtcgattgtactaactctcccagtgaatcgtgtacacactggctgcatactagatgcgttggattggagcgtgcaaacctgccctccgtctatgtctgtgtcttttgtgctcaaacaccatcccgacaacaccgtgcccgaacaacttatgttcccacggggcaagcccctccctctcccttggcccacaagtcattccgcttccggtaaacccggtgcgttgactgccatcttggattgcatatatgtcttggaaagaccggtgccttttgatttcttttgtgttctttccccaatcgggctctcttaaactctgcattagccgggccaccctgccccatttcataatcgcccgaaccccattaccctcatgatacctatgtactattccctcacaaccctggacgaaatcagaatagaatcatttttatacttctccgcacatctgtattatttgtagcctgcataacccccccccccacccccccccatcccnnnnnnnnnnnnnnnnnnnnnnnnnnnnnnnnnnnnnnnnnnnnnnnnnnnnnnnnnnnnnnnnnnnnnnnnnnnnnnnnnnnnnnnnnnnnnnnnnnnnnnnnnnnnnnnnnnnnnnnnnnnnnnnnnnnnnnnnnnnnnnnnnnnnnnnnnnnnnnnnnnnnnnnnnnnnnnnnccccgcatatcggagtagctaaccggtctcgggagaggagccggcccggggtctaaccccaggaaggcccgacttatttaatttcataaaagcccatcgatccctctttctcagtcagtttctcaattttactccgcttgacctcctagttgactgaacctcgccgtgtttacagtagaccctaacaaaaagccctatcaggtaccccgggccggtgaattgtatagatcgggctacggtctgattggtcaattcttacttatcggctcaccgcctttttatcaaaaaagcacttttctccgcgcggagtcatattgcgctctttctttttttgcgcgccattcacactctttggtctcattccagtcattcgcgcttcgccgttcactcgctccaatgtctgcctctctccctggcagtcgggacctgcctgcgtcgccatatgacctgaagacctattggggtcgcgtgcgccatgccgccgacctttctgatcctcggtaagttcaaatagaagatattagtggcattgagagatccccagcatatactgatcataccaattatgttaggactatgtttgtttcgtccgccgggcttgaaaacgccaagaacctcattgcttcttacaagcagaaccgcatcccggccatgacaccggagttgtggtcggcgaagaagatcgttgatgcgacattgcaccctggtatgggctcgttcaatgtcaggcaatagccattggctaacttatgaccgatcagatactggaatgcccgtcttcttgcctttccgcatgtcgtgctacgtgctctcgaacttggtcgtcactgcaggcatgctgactccaggattgaaggtaagcacctctgcatatgcaacatatgaacaacgtactgacaatacagacaaccggaaccgtcctctggcaaatcggtaaccaatccctcaatgtcgccgtcaacaacgcaaacgccaacaaatctacccccctctccatgtcgcaaattggcaagtcatacctcctggccgtctcggcctcttgctccgtcgcagtcggtctgaacgcccttgtcccccgtctcaagagcatctccccaaatacccgcctcattctctcccgcctcgtccccttcgccgctgtcgcctccgcctccgccctgaacgtcttcctcatgcgcggcaatgagatccgccatggcattgacatctaccctgtcctgtcagaggccgaacgtgctaagcgcgagctcggtgagcacgcagagccagtccaaagcatcggcaagagcaagaaggcggctacccttgccgtcggcgagacggccatctcccgtgtcctgaacgctacgcctatcatggtcctaccaccgcttatcctcgttcgtctcgagaagacggactggctgcgtgcccgtccccgtatggttctgcctattaacttagcgctgattctgggtacttcgctcttcgcgctgccgcttgcgctcgctgcgttccccgctcgccaggctatcaatgttaacagccttgaggaggagttccacggtcgtggtggtgacctaggcatggtggagttcaatcgcggaatgtaagttttgatctttggtgtttcgcagcgtgcatatcacatatccttgcataggtcagaaaatatatatacctgttccccgtttataaatgtcattactgttgtccatatagaccattcaatgaataacaggtaccactctgcccttaataatcccctcaactcgctccgcaatatcaagcaattcatcatctccccaacgccggcctatcagctccaacccaactggaacaccaagcgcagcagacgcagttttaggactccgcccagctgtattcccatattagtccaacaccaagcaccgaatatatataatcacctaccgggaatacaaatagcaggcctccccgtcaacgcagccaaaacaccattccgcccagactgcttcttcgcaccaatcttcacaggaagccgtctctggtgcggatacaccagcgcgtcgatatcgtatctatcaaaacattccgccacagactctttgagagcagcaatatactccagtcgacttcggtacgcctcgctcgtcagcgaaaacctctctggatcttccaatgccgcagagaaaacatgcgtcacggcatgaggatcgaactcgccgctctgggcaatggattccagagatcggtgcggtatcgacgaaaccagcggcgactgcaggaactcgtctaggtagtgcttgaactcgaaagcctgtgtatcgccattcgcgaacagggtttcaggactccagtccggatgactggacggggcgataggcacgaagatgatatccgcatcgtgttcctgtatcgaatccaaactcgagcggataacatcctgcacgatctcgttctcggcgagatactccgcttccgcttccgattccgattcatctgtacagatttcaggctggaaataagcctccaagattccaatccgaacctgtcgatcctccctccgaggtaacccttcatctacccccaaagaggatataccatccccatccggccccttcataaccccatacaaaatcctcacatccccaacacaccccgccatcggccccgccgcatcctgcgtccgcgaaacaggcacaatccccacacacgagaccctccccgtcgaaggcctgaaccccacaaccccacacgcggacgccggcgagcgcagcgagttcatcgtgtcggtcccgcacccgaccagcccgaagcccgccnnnnnnnnnnnnnnnnnnnnnnnnnnnnnnnnnnnnnnnnnnnnnnnnnnnnnnnnnnnnnnnnnnnnnnnnnnnnnnnnnnnnnnnnnnnnnnnnnnnnnnnnnnnnnnnntgccgcccccccccccgacccccccgaaccccgccgctagcgccgcggcggtcccgccagaggatccgcccggggtgcgggtcttgtcgtgcgggttcagggtttgcccgccgagcgaggagcgggttattccttggagggcgaattcgtggaggttagctttgccgaggattattgcgcctgcggcgcggaggtgcgcgacgacggcgctgtcggtggttgtttttaggttttgcagggcgagcacgccggcgcttgttggttggtcggttgtgctgtagttgtcttttaggattagggggatgctgtggagggctgggaaaggtttgttggtttggttgtaggtgagtgttgtggtggttttttggagagcggtttctagggctgtgctgtttatgctgatgagggctttgagggtcccgttgtgctgggtgattgctgagaggtatttctttactagccttgggccattggaggggtctttacggagtagttcgtggaatttggggattgttagctcttctgcttgccatggggagtccatggtggtgagtgttggatagaggggaattggggaattgagaattggtggagttccccggatgttgatctagtgggccaattcacgcacgccatatatggatctgcagtttcattgatggagtcaagtattcgtaattcatatttgccctaaatcggcaatgtcaattggcaagtgagcttgccatcatgtagaacccctggcgcacatggctcgggttatcctccgatgtataagaaaccgagacgaaaggcacagtcatatacagatctgagaagaattagaaaattgaaacgaaagaaacacatatatacacacaccatacggttaacaaatagacgccacaaacaatcaaatggtataatcatccggactcagcctagaccctcccagggctcccgaagccggattccataaacaggacgggaaaagcagaataacatgtaaccggcgcctttaagaatggatagaaagatagataaagcaaataaagtaaaaccggatagcagcagaggataggtccctcaaggataaatgcagcgattccggttgctcaagggccaagggttcaatacccctgccatgtggtgtcacgaaggcagccgacgcctgcatgaggtgacacctgcaggtattgaggggaaccctcccagggaccgaaaataaaataataaagagaagaaagaaagcatcgtgatcatgattttccgaagtgcaaacaccattccgtcccattcgcgatagagaaaaagattaccctcaagatatgagccttccatccgtagctggatcctgttcacgccggtgaattcccttctgatgccgttgaataagccgaatactggctactgtagctgtgtggatcgaggcctaagtgcgtgcttggcgatgcaatccttggccgatccggtaagcctctgtgccatcgtcgacaagtgtctccttgaaccacgggtgctttaatgcctcctttgcggtgatccggctcttgggatcgtatacaaagatttgttgcagcaaatccaagaatgaacggttgaatggcgtgttggtagggatgaactcctatagacgaaatcagtcaaaagaaagccccacaggtagatatgggggacacttactgtcaaagacttcatcgcgcggacatacttccgcgaggctcgggtcgtttcagcgttgggatagtcgatcttgtttcgattgaagtacctggtaaagttagtccctatcacagaaagattgaaggggcagggctatttacttagcagcagagttgatactaccacctcggcccgccatgactttcttcaccaaagcagtgtcgattcgattgccaatgacggactccatcatcgccaggtgttcaaggttgtcatgcgtctggaacagggcatctccggtgaagaattccaccaggatacacccaatactccagatgtcacacgggaagctccaacctaggttcaatatgatttcaggagcccggtagtgacgggtagagacgacagatgaatggtattcgtcatcgaaggtcgccgaaccgaagtcgatgagtcggatttcaccatcgaggagaacgcggcgctgtcgcgcgttgcgagccgtggcatgggaagaggaagggatagtgcggttgtaagtgaaggtttggtaggcgttgctgacgaggaggatgttttcgggtttgaggtcggtatggataaggtttaggtcatgaaggactaataggtcagtggtctaaaatgcagatttagaagtgttggagaacatacaggcaacacttgtgaacagctgccgggcaaactgctggatctgactgctcgggaatggcacaaagccattccccttgaggaaatcaaacacgctttgtcctagtagatcggtgacaatgcaaatgtgattccggaaatcgaagcagtctcgaaggtggatgcatttgttgcggttgcttttgtcgttcgaagccagagttgacaagactcgcagctcgattcgagatgcgtcacgatacttttggatcgatcgtatgattttgactgcacagcgagccttgcgctgcttgtcataggcttcgaccactttgccgaatgtaccttgacctagaagtttgatcacagaatctcgagaaaggttagcatggtcgacaagatgccagagatacttttacttacatcgatctgtcaatggcgtgtcgggtgtgacaatgtaatggccatcgtcatcgtcaaacttcttgatctgggaactggtgtactgatcgagcaaattctgtcagtggacctgcacaaaagacacggtagataaaacactcacatcgcgaacgactggcacaggaacatcctttgccttgattggcggcttcggaggtgggacataactcaggaaagcatcgcctgcggtctccaactctcgtcgcttctgctcgtcgcgagtcgatttccgagtggcgcgtttccgcttttgaccgacagagccatcctcatagtatacaccattgctcgcccccgaactgccctgcgaaccaagcgaagttggagctgttgtgtgtaaagatgcggttcgatcggtcgataaagacgtggcagaggattcctcgccgtaatgttggggattgattgagaatgacgggcggtcatagtggcccaggtcataggcggtttcaatccccgttcgccgcctcttcccagcgggctgagcagccgcaggaggtggtctggcagaagtatttgcaggaggcgcggcggcaccattggatggctctggaccaggactgtcatcgatcacaatgacttccttgggaagtccattcttgtagaactcggtccaatctggtttctttcttcgacctccaacagagggagccacactggaaccactctgattggtcatagcagacggggttgttgtcgcggggggaattctcggcggttgggtgtagggaagggtggtcgttgtcggggaggggacggaaatggcgtaaggattcgcaaggcgagtccctgcggccgtggtcgaagtcgggtacgaggtattcggttggtacgaaggatggtgaggatatccgtaagcctgatgatgagaaggatgcgttgcagtggcagtagacggagtggacattgtgcacgaaggtatcccgtcacacgaacggtatgaaggttgtggagagaagactggtctaatttgtgaccgctagttgatgtcgcgcgtcaggcttcctgggtggatacgaggatctcaaggcaggactagccagccagagaagaaccaaaccaacagagattggagttgacaagcgtgtccggagggagatctctggagacgtgaagatgacgggctgaggcggtgggaggatgggaaagacagtttcaaatgcgttgcatttcctcgacaatttcaagacaaggaggtgaagcaaagagcattggggaacttggcgacatctgtggtaaacgaggtggggagggaagggcctggaggcaaaggtcagtgatgatggaagagtcggagagttgggacccgttgccgatcaacttgggatttgagatttgagatttgggattttgctcctcttaattcgtattatcttctatagaattacactcgccgcctggaatacagctaattcaggctaatttatgattgtcctgttctttttacttcttgatcaagtttctcaagcgttaaatacctaaatacccatgttatacgatgttcggcctattccctatagtatacacagaaaaacctcaacccagaggcccatgcgcctctagggagaaaggcggatattactttctcattccaatacagccatgaatgtaattaaaaggatctaaagtcctagatgggccttgaggggcccccccagggcccgccaccggaaatggagcatcgcgtccaagccctggcttagccgaatccaatccacaaggcgcggtgaacatctgcggtcaagaatattcagaataccaagaataccagtatcgaagagtatatcaaacattacagcccctaggagatccaggaaatcgcccgtatagttaccacctgacattctcactgagtcagcatctaaatcgggaaatacgcaagccaattgcgtacaggcatattagaactagacgctaatcagttagtcttcgatgggctaatggtttcatataagagtgaaaaaaatcaaccggggagaaggggttttatagagactataggaaatgagaccttacatatctatgtccaggttgccttgtcattacctaggctacagttactggattaagttcccaagagatatataaaagtgaggcaatccaaacagcctaggtagacaccaatgctaataacacaacatatctatgaattgatatccaatgattggcagggtattccgtacctttgactgcctcggctctaaattgcctcaactggacatctttaacgccaaccaaatttagtaatttgatatgcgcctagttaactagctatttactatttagactggctagcgtgtggctgtgagaactacaagatttaaatagcgatcttcacttggatgtttataatcgggagaaccaaacacatagaatatgacagtagagaattaatatgatccaaagcaagtctcatttattgccttgcgctagaggaaactatccaagagcgacgagagtaatttaccgaggtatgaaaaaggccctggttcctctatcctcttaagatgtaagctcaacctgtagttgagtggaattaaagatcatggcctgacaacctgacaacccccataaaccaacgccatcatacacacgcagagaatgcaagaactcctggtgcccggagccacagggctcccatgggccaacaaaaattaggggcataagaaaataagattacaaacatttatgacccagtcagtttcgatcgcgatcctctctgggatccttcaggtagcccctctgcacatgtctggtcgcccgtccatccgcctccaacatgaatagaaggtctctgacctgaatacccattcccttctcttgatcttcacgccatattccgaggcgacgctgagcgtgactgggtgtggattcaccgacaccggacttctcaggaccggcggtgggcgtggaaggagttggacgtgagggagacgagaacccaccggatttaccaccgggcttcaaccatgagtatgactttttggcgccgaacatactgcggccacccccagacaaagccatgcgtgccgtcgccacagactgtgcatgctgttgggcctcggttgctttggaatcctgcattttcttcgcttcttttttgctaattgactttttatcgaaactaggcgccctttcgctgaggggcgtcgagggcgcagatcctggatcgacagactcggctcgaccagcctcatcaaggatggcattgctgttgcgtttagcacgcttggctgcgcgtttttcctcttgcgaactctcccggtgtatgaatgctctgtaccttgccgcatttggctttgcactgggcgattcaatgctagcatgaggacctgtcaagtaattagtaccaagtcagttaagtggatatgataagcgaaaccatacgtttcacgggggtttgagtgctccccgtagcctgcccagggggtttcgcgacatctttccactcaatgggaactaggccatgagaatgtgctcggcgacttcgagcaagagtcgaggcgtagtcgatgacacccctgaatctttcttcggtagaaatagataggagattcagtatgtccacaagaggagcaccttcctggttgagaattgtctgaccagtgcgcaccacagaagagccatccggaccagtaacttcaatcggctgtggtcggccaggtacagggtgaaaaaggccttccgaggggattcgaacaccaaggtcaaagcctcgtttctggagcttctgttcgaggagttttgtgatcaagaacggttcttggatatgatactgtgctcgccttgctgcgatagtgtcctcgcgagtcggttcgttgggatccttgaaggggacatgtgcctgagatgagcccgcgaaagagtcgtgtgtggtcgccggtttgatatgaggcaaatcaccgaagctagtcgaaggggttcccggggtagagccttgagaagtgaaggaggtattgatagatggcgggtattgagactgtgatccgcgatggggagcctgcgcctgcgcattctgccctgaaaagctctgtgtgagaaatgcttcctcttccctcacatcaattccagatgatgctagaacatctgtcagttcagcagcatctgttgttttgtccactgggcgagacggaggacccatagtcccgggaggagcgggagcagatgttgcagacatgttcatattcatgctcatattcatcggcgttccgttcatgggagatggattatgtggtagctgaaccgcgttgaagctcggagaaccgtagggagattgggtttgagaaggcggtagaggagagaggcgaggtcgcttggatggagggggtacagcaccattcaggggagatgctgccgagttgggagatggggacgagacaggcggggagaaaggttgagaagaaaactgtggcggcgggggtgcctgctgctgtggatgccgagcttgggccatggcgattgtcgattgtcgattgatgggatttgaaatgaacagaggctattgcgccgagccgttgtagctttgcgaatgaatggaggtccacgcgtggccgttaaactgagcggattgctcgcaccaccagccaccacctttgaccatctcaatactgaattcaaaccatatgtacgacacgtgaatgttagaattgttggctcgcgcgcgaatctagcagtaatcggggagacagtgatgcgtgacgtggtaaggagctttctaggtggtcgaactctgctccgcggatcgcggattgcgacacacgtgactaagtttgactaagctctctgaatctgcgggtgtcttggtcgcaaaagatcaatcttctattgaatcacacatagtcctcataagtatattgacacctgcttcaatacccggagctgctccattcatcatagcctttcgcgcaagttatgggtgttgcgctgagctcttattgagatcctaggcttgatcgtgcgacgcgcgggtgctagtccccttcaactagacttcttaaactcatattaaggaatcggtcaacctactgacaccttgcccaattaatctctaacacctctaacacctctaacaccatggcgtccaaacgcaaagctgcagcaatgggaatggctggtgacgatgagcccgttgacccatcagacgaactggcattctactgtctcggcggcggcaatgaagttggacggagttgccacattgtgcaatataagggcaagacagtgatggtaagcctcagctgggacaaggaatgaactcgcagatactgatctcctttgcttctgtagcttgatgccggtatgcacccggcgaaagaaggcttctctgcacttcctttctttgatgaattcgatctgagcacagtggatgttcttctaatcagccagtacgtgcatctctttttttgttttacatatatggaatcatggcaagcacgaccgggcatcattctgcacttaccatgaggcacctggcacctgctgcaacggaaggacacattcccctgcatatatatgagaagcccaatacaatacattgtcatgcatatatttcttgtatcactgtaccctcttgagtttcgaattcgaatgctctcctggcgcgtttgttcacggctatcgcagttgactaacggtctgatctgtatagtttccacgtcgaccattcttccgccctcccatatgttctcagcaagacaaacttcaaagggagagtcttcatgactccagcaacccgagcaatctacaaatggctcattcaagacaatgtccgagtcagcaacacatcctcttcctccgatcaacgcaccacgttatataccgagcgtgatcacttgtcaacactccccatgattgaaaccatcgacttctacacaacacatacgatcaatggcatccgtattaccccgtatcccgctgggcatgttctcggggctgccatgtttaaaattgatattgcagggcttgtgactttgtttacaggaggtgagtttgctttgttacaccttggtcatcaacagcattatatgtcaattgctaatcgaccgatagactactctcgcgaggaagacagacacttgattcccgccgcggttcccagtggcacgaagatcgatgttctcatcacagaatctacattcggtatttcctctaatccacctcgattagaacgcgaggccgccttgatgaaatcaattacgagtgttctcaaccgcggaggtcgagttctgatgccagttttcgctctcgggcgtgctcaagagctgcttcttatccttgatgaatattgggaaacccacccagaactccagaaatttcctatctactacatcggaaacatggcaagacgatgcatggtcgtgtaccaaacatatattggtgctatgaacgataatataaaacgactcttccggcagcgcatggccgaggctgaggcgagtggcaataagagcgtcagtgtcggaccatgggatttccgattcgttcgaagtcttcgcagtttggagcgtttcgatgatgttggaggatgtgtcatgcttgcctcccccggtatgttgcagaccggaacaagtcgtgagctgctggaaagatgggcacccagtgaccgtaacggcgttgtcatgaccggttacagtgttgaaggaaccatggctaagggattgctcaatgaacccgatcagatcccggctgtcatgtccaaggtttccactgggcatggtcgtggtcgtgttccaggagtgaatgatgaggatcaaaaagtcatgatccctcgccgttgcactgttgacgaggtcagctttgcagcccacgttgatggcgtcgaaaatcgtacttttattgaggaagtaggagcaccagttgtggtaagtgtgacatccacccagtctatttgaaaatttactgacccactcaagatcctcgttcacggcgaaaaacatcagatgatgaggctgaagtcgaaactgctcagccttaacgcagataaaatcgtcaaagtcaaagtctacaccccagcaaattgtgatgaagttcgcatccctttcaaaaaagacaagattgccaaagtcgtcggcaggctcgcagagcttgcgcctccatcggagaatgatgatccccagctaatggctggagtcctagttcaaaatgggttcaacctgtcgttgatggcccctgacgacctacaggagtacgcgggcttgacaaccacgactattacttgcaaacagcatatcactctcagctctgcgagcatggatttgatccgatgggccctcgaggggacttttggggccattgaggaaattggaaacagcaagaagaccgaggctaacggcaagaacgacatggatagcgacggcactccaaagcaagaagatgccgacgaggagatcccatcggacgagacacagacattccttgtcatgggatgtgtgtatcttcgccatcactcccgcacccgcgaagttgagttggaatgggagggtaatatgatgaacgacggagtggcagatgcagttatggctgttttgctcacagtcgaaagcagtccggcctccgtaaagcgtatgaatttctgtccttgtccacctctttacttgtgctaactacggttatagaatcggctaaagacaagcaccaccatcatcaccacgatgatggcgaaatggaaatcccctcacttcccaaccctcattctcagtctggacctcaagagcggcttgctcgtatgctgatgatgctcgaggcccaattcggcggcgataacattggccccattgagcgcccacgaatcccggcagatctcgcactcggtccacaagaagatggcgagatgaacgaagaacgaattgccgatattgaggctgccgagctggatcgtcttatcacaatgggtgttcccgtccctggtattgaaattagggtggacaagcatattgcccgtgtgtggcttgaggacctggaagttgaatgtgcgaatgctgtcctgcgagaccgcattcgtgtagtcgtcgagcgggccattgagactgtcgctggtctgtgggcagagagctcgattcaccaggacgcggtgcttaatggttctgtcaacgggacaaaggggattgaactggctgataggaagaaagcggctgccattgaggctcatgcttgatctctgtcatacttgtataataatgaaatatttccatcatccatgatttgacttgacttttctacatctgcttcgtcatgtagtgtttctttcggtagttggttttttttaacaagagaatgagattgattaaaatattgcacgttccgaggatataaaagtagactcttagagtagatagatataagtgctttatagcgaggcaaagacctcctgcagaactttctccagggtgtcaacaataatatcaatctcctctttcgacacaatataaggtggcgcgagtataagatgatctcccttaattccatccacggtaccagagcagccatatagcgagacactgtactccggctgtagacccttctcctggatccggtaagacagacgatccttggggtcaaatggctctttcgtagccttgtctttgacaaattcaatctggaaagagttagtacatttttttgtcgtgcaatatctactacaggaacctgcaacttacaccccagaacaaccccttcccacgaatatctccaacatgagggtgactctcgaatcgctgcttcaatcgtgtctcaaggtaagcacccatggtccggacattatccaccagagactgctcctgaatagtcatttgcacagcaagcgcagcagcacatgagaccggatggccttgatatgtctgtccgtggcggaactgcccggtgcctttgtccatcgtctgcacaatagagtcaccaatcaagacggccgacaccggcgcatagccaccacccagaccctttgcaatggtctggatatcgggaacaacatcttcttgctcccagacatgcaaggtgccgcaacgacccatgccgctcataatctcgtcaaggatcaagagggcgccgtgcttctcgcagacggctttcatggcacggaagtaccccggtaccgcggggacacagccgagagcctaactagtataagttggatgatctgatagcttagagttcaatataggaagtcataccgcgccgacaaccggctctgcaatgaatgcgcacacagtctcgggtccgacacgttggaactcagcctctagctcggctgctagacgtgccacatagtcagcatcagactcaccgtccagcttcccacggtatgcatagcatggtgaaacatgggatacattcttcgagagaagtggttcaaacggctgccgacgctgaacatggccaccaacggaaagcgccccgagcgtggtgccgtggtaggatggaagacgcgcaataaacttggtacgctcgggttggggagttggaagctctaagaaatattggcgtgccagtttgagtgcagcctcgacagcctcagaccctagatatcctcagcactgtatgtgtgaacagaatttcgggttcttggaagggctgcctcgactcacccgaactggttataaagaccttggatagttttcctccagtagagtccactaggagtttggcaaggtcctcggccacttgggtgccgaagaaggcagaatggcagtaagatatctggtccatctggtccttgatcgtctgggtgacctgttcgttaccgtgtcctagacaagatacagccgcgccacctgtggcatcgaggaatttggtcccatcttctagaaagacgtagcaccccttgccaccaatggctttctttggaacgaagcgtgtgtcccggtggagaatagcactagccttggtttctgggaaataatgtcagaaatatgccaagatattgcatgtgttgacataccgtcggtcatgattgaagtttatagaaatgtatttcaaagaaagaacgcccgaggagatcaaaagccttatatatacctgtggatctctctccgatggtctcacccgaggcaatgcccctgttctgcggggctaagtgggttcggcataccgaagggaagaagccgggccctcaattggaccgggaacggactttactgtttcctatcttgtgtatctggtctatcgtgtttgaagagaaactttagttgtagattggcgtctggaaatgactcattcttatgaatgcctgggtgtactcgggaaagatatatctgacgttgagttatacttcgtggttcggtttggataaataggacactgcatagagcatggggctcatatatttcatagcaaaatattgataaaatagaattgaccaacagatccctaattatttcccaaacacaatcccaaaagacataactagggtcattattaactattatcaatcatattgacgtgcacttggtcgaacgttgaacagacatccccacgtcccaccgcccgcacactgcattctgcccctcttacttggccacaattcccgcggccttccccagacatttccccatctaacacatccaaccctccacaatgtcgcgtcgcgcccaaatcgaggaagtttccgactccgacccagaagagatcgccccttcttacgactctgacgaggaccttcccagaaatgccatcatcgcacccgtaaatatcccgagggctgcacctcaacctcaacaacaacagatgcccatgccccagcccatgccatcgatgccggcgcctgagcctcagcgcgagattccccgacacttctcatgcttgtaccccgtgtacttcgataaaacccgatcgcgcgccgagggccgcaaagtcggtgcggagctcgcagtggaaaaccctcttgcgcgagatatcgtcgatgccgtccagatgcttggcttgaatgccggcttggagccagagaagctgcatcctaaggattgggcgaatcccggtcgtgtgcgtgcgcaggttaggacccaagatggtcaattagccaacccgaagatcaagaacagtacgtggctgatgcctttgatggagtgaatgcttctttctgttggacatgaactgacattgttgcttagagcaccacctctatattctcgtcgcacagtacttgaaggctaaccctaccaccgaaaaatcaccctaccggctacgaatccgtggcctgcccatgcctgagaagcttccagcagctcctgctgccccgcggggttggaagatcgggacgatcctacctatccactcgcctgcctacagcggtggtggtgtcagtgacaaccccctcaaggacgcaatggccgagatgcagggcatggagggaatgccgaacatgtctgaaatgatgagtcaaatgggcggaatgggtggactgagcagtatgttgggtggactaggcgggctaggcggaatgggtggaatgggcggcgagccctcaggggcaggcgcggaaaagaaaaagaaggaaaagaggaaggtgatcagggcatgatttagcatgccctttattccgtgttccaattgcattgtatggcgatgggcgttgctttttccccctaatttttgatgcactcgagaaagggatacttcttgataccacggatctgcatctgaattgatctcattgtacatccacctcaaatcatgtccaacacctacctgatagttgtctgtcctgtatgaatcgaacatttcttggactagcaagtgccgataaaccataagagacctaccaagaaagaaggtggagtatcagttctaaacttgcatataactatgttatgcaaatgctttagtagtgctgagtttggtccgagggttgatctagcgggattcattcaagaagcagtgaacgataagtcatgttctcatgcaagggccggcaaatctatgtactagctaaaacggacatgttcatgggtatcattatcatgcggtgtgtgtttctgtgccgtccgggcatcctccatttctatactgccagagccgactaaagtccttgacgcgcagtactcgatccaactcattcggcggtgaccgtcgcacggtcaatgcgacagggagaaacgcctcgtctcgggctatcgtggacccaactcgacgcggaggaccatcatatccatttataccggcggttgcccatggctcgacttccatatccatgaatgaattggagtcgaggacgttcatatcaggacctagggtaaacatgttgccgaggtaatgcatgttgaacaggtggcctgaatgcgggcgcacgaacagccggcccatgtatcgattcgggatttccacgaagtgaagcactcctccctgagccacgatgtcaccttcattggcgtagtgctcgatgtggccgatggactgaccaaattcaggcgttagatcaggtgctgtgtttccttgtggccttgcgagctttgtccatcgcgggttgttgaagtgattcgcggcatttccgaaggtgtatacctccaagtgatgaaggagattgtgtggtagctcatccagaagccagtccatgacaaggcccccttcaataccgccttgactgtgaagaagcagaaccactttatcacattctgggtctaagatagcttccttgaccaaggaatacgctcgtcgtatatcgccagtagcgtaggcaaaatctcgctgaatcagacattcaatgagatcaaatatgatgccagcgctagattccattagtatttgcaagtctgaaacccaacacgttacttacgtgcgattgtgcacggccgtcactttccgaccaaagatgtatgacagttgatcgatgttcatctgtacccagtggtgtctacaggtaatttgagttagcaactgaagacagagaactacggagatatatctcctaccccgctgcaattccatttatatacacccaacgctcccgctcatgacttggtcgctcgaccacagacacttgagataccaggacccgctggaagctgttcaacatcaacatgacaatcgaataattcacagtgaaagcaatagccgaataaacaatgatccacaggccaggagccatgcagataaccatgatcggcagcgagagcaggaaagcaacttgataaaccaagagaaacacatgggtcaacaccgtagatgcattgcgtaacgacggatagagctcgtccagctcacgggtgtgacctagattgaggggccgtagaatacctggaagcgcccatagcttcgagataaacagggacaagtcgctcgagagtaacttggtgggcgaggcagtgtagggcaacggggtatcctccttgcccggacatgtcattgtggaacgttgacaagagaagaagtgtaacgttgagatgaaagtggacatgaaaaaggcgctttgttgtcttgtcatgtgatatagcgcctgcctataacctcgtgttcgtgagatctatacgagcttgtgacttacatcggctgattgacctacaggacttttttggaatgtggctttttggtttctttcatattaagtaattacagtgatattattgttctcattctttgattccttccttcgatgaaacttgaatctccgtcatttcgcgaagcaaacctgggagaggcgcttgcaatcagcgtggtcgatgttctgttatagtcaacacacagttagctatagatcagataatgggagaatatgaaagggaggatattaacgaacaccatgacgcatttttcgacgattgttgcggcggaacagatatcttcggttgatctgcataccggcatggcgaatctcacttcgataccattttgcaatgtctttggcggtactggcaatttcaatgtcgctcaaattccagtatcctgggacacgcagggacaggcaccatttgacgtcgtgatggacgggctcagatgaaatgataccgtctcgggcgacgatgcgagccaccacaaggtccatcaaatcttcgtcgtcaagttggtgatcagcccagttgaagaagacagtcacccactggtttcttccagcgggatagtgtttttctcgaatgtttcgtccatctggatagttgaacattccttggagcttggtgcgcttctttgcttcctttgtgactggagaggagtcaacagacgagattggtgtttccatggtggaaatgtctgagatagagaagaagatattggtaagatagaacaggaagaaagaagtgagtcgagaatgagacagggtgagtttaatatctacatactatattgaatggaacgaaaagaacaaagaccattgatggtttttaatagtacaattcattgtgattgagctgtagagcgattaataggagcctttgatgatcgcggaagttaaccccaatagtgcactacaataaagctttgtcctttgaggactgaaaacacattgtttagctgagctcacattatgatgaaagcacatcgacaacaagctacttcattaggagtatataaacgtccgcaagacaaaattctcctccccaaacaggatatcaaaaccaaacccaagcccctgatccagcccagcaggacgctgtgtacacaacctgcgataggagtgaacaaagacagtctagtgactacatcccattccaaaaaatataacttggaaactgacctcctcatattgtttattatttaggacagacatatcgtctgaaatctaccacagggctaccacgacccagccctcctttaaaactgtgataaccaaaagcaatgggaaaagatggagggtggttcgaaaacagacgagacacaagcggtagacatagagcccctttctcaggacaaagagacacccggtttgtcactgacctgagaagggacgaaattagaaagctaacagagatcctgcacatagacaacacaagagcgagacacactggtgagatcgtcaggcgtatgatacgcgagttgccgaaggatatgcgccgtgatcgctggtcaagaacgaacaagcatctgtgcgatgcccaccagggtctgaatgcaaatcttatggccgatgtgttcaatcttgttcagagggaggtcggtcaccacctccgcaagtttgacgcgtacccggacctgctgaagcccctcgatgtattgatcctgcagaagctgcaggctatacggggcatgtgggagaaacctgacccgaaaaacaaggctgtctcacaagcatggcactatgagatcagctgctgtcaggggtgtatggtggctcggattgcgagtgacaagcatgcgctgcgcaatcttcgaatcgctttgctctctcgcacgcagacacgtctgaaccatgccccacgaagacttatgaaatttgtcgatacctgcattgacctattccctgatgacgttgatgagctgtatggcacatctagccagtttgcattcatcttgaaagatacccgcaaggcctgcagcaaggcctgggccaaagacccagcacatgcggattcgaggaccccacagcgaaggcacaccgaccatgacaagatcgacaagggtgacagaaacgaaaagatcggaaaggatgcacatagccatcaaccagctagtgagtatgatccgaggaagaagtatccccagccaccaccaccaatcacattatcacaccctacggaaaggtatgtccccgaatcatcccggtcaacttaatgtactgacactgacactggagggcgcagaatatatcgcctgacgtcgggccattccagatggccgtaagatcatcgtaccatacggagctagatcgacgctcagacccgaacccggaacgcatcactagatttttggatttcgccgatgacaattaccaaggcttaggaataagcacggaaaggcaaagtgcgagcactttttatggacaccctggaaaccccccgtcaccgagcaccgcaagcacactcttgggaaccatggaggaaatggacaaacttcttgagatgtacaagggtatgggagcaaacccctactcgcacagcacgcaatattgttcattgcatgggggtagcggtgcctcatcacagtgtcgttccccgtcgatctattccactggcagtgaatggagtgacgaagacgaagactggaggatgccagaaagtggcccagcagcgaggaccacttggaatttgttgtgtgaacagtcgaatatgatctgatcgcttctttttgtcttcgcatctcgcatgggcgctttgttcctcgtgctcttgtgccccgtcatttccttttgatgccatttggtttttctttttgattgtatgtcaaatctggtccgagtcaggtgttctgagaatatgatatttgcaaatgtatccgagttaacgaatacccaaaggaaagaagtaaatggcaaataataaacattattgacagtaggtcatagagcaaaccatgtacaaagcattgacaggcgcattctgaagtattaatacattgggccattgatcccatatacaaaaaataacggaaagccccacagtctggcggagtccgccagcagctccagggacggggttagggggtgcgtagaaaaatcaacacgttctcgggcttcatttcatcatggcttcagttgtggagaacacttccaggaaccccgtgactcgggcccttgagactatcaacagtctttcggcgcagccgagtgcgggccgcaggtccctcggttgataccaccacccgctcacgctcacgttcacgttctccggtcaaagtcacagctggggtgttattaagcgcctgggcagcatccagatccacctgcttctgagcgttctcccgagctcgctcgtagcgcggcttgacctcaccagtccaccgagtgccaagaaggcggtcccagaagatgaagaacggctgggagaagttggtcttgataccccagctttggtgatgaatgtcgtggtaggcggcgttgttggaggtaaaatgctgtagtggatcccacgggaaggcgtagccacagtgatcgtcgacagtcttgatagtcgacattgtaaaaaaccacatggcctggcgggtggtcatgccagagaccaagaacccaataccagtgccagctgtgtccaggaggaatccctcaaccggatggttgtagagggcgccgaaagcataagggacgtaaagacggtgatggcgggagtggaaagtcactaacagctggttagtatggaatcatcattcaactttgaaacgtcagacataccatagagccaccggttcagatgcatagcgcggtggaggaagtactgccaggtatccacaatggaaatcgctagcatgaactggagggtcggtataaagtaccaatatatgaaactggcaactgcaagttcccagctcgtgaacgcgggcgccacagcctcggctccgttgtcgaggattatggactgggtcacatcggggtatgatccaccagccagagctccggccaacatagtataaccgctttgggacacggattttccaagactgatagcgtcaactccaacaagagctaacaatgacgggaaggccttttgtgcgatccgcaatcgctgcgcccacacggcgacatcatattcctctctgccaacagtttcctcggcatcaaagtataggaatgcaagaccggccacggtctgaatcacctgttgtaagacaacatcccgcacaacttcccagcgagtcactttgtttcgtttcagaacttctgcgggggtgtggaggcggtattcgacgaagtaatcattaacatcgaggtaatgatagatcatagacaggacccagtatgcgatgacgggcaatacaagcgaaaggatgttgtcaggaagaaaagcaagcagatgtccttgtggtgtcaaagtgtaggttggtaggggaggaaggtcaaacgcgacggatgcgttcatagccatgacgaaaggatggcgatgtgttgaagtgtagcacaaatatccaagagtgccgatcaaaaggatctcggaatcaatatcttggatattgaaatggccccaaggtcagaaatcaaacgaagagtgaacgtctgcaactgcccaccacgtcgaagtccggatgctgacgggtaggcgcgacgcaagaatgatttccgatcagtcagagacctctcggagctggcggttacatacaaaaggaagtatgtaaaaagacgaagagaatcagataatgataatgaaggaaagaataggaacggccgaagaagataaaagataaacgttcagatcaggagacgcccggattcgggtggcgcgagccggagccaagacaaaccagtacgatacacgtattattggtatctttatagatcgactgatagaaagaggcaaaatacagtatggtatggtatggcatagacttatgctgactcagctttatacttcgacctggacagccctgaacgaaagtaaattggttgctacagtgaaaaagaatctcaattgatttaaattgaatgtttcggacggcttttatcgttgaattggccataccccttaatttgccggtatttatataagccattgttgccccaagaatgacattgtgcctgggaagtaccttgaagtacccaatactgcgctaacacggagccagtggcggtggcccagactctccgataccgatttggtacaaaccgaacaaacacaaagtcccccgctctattttttttttttttaaagaaaaacctcgtccccccaccttgaaattgtttttcttccttcccgtgctacccttacttttttactctcttcgtcttcttaacgtataattccgccaaaatgattatctacactgtatgtttgtcaatatcaaatccttagatttgtccctcttcctgtgtacgctctcagaatctcaactgacacccaccaggacatcgtttccggtgacgagatcgtcgccgatacctttgaccttgtccccaacaaggacttcgatgtcctttgggagtgtgactgccgcaagtacttgaagcgtgccaacgaggacttccagctcgagggtgccaacccctccgctgaggacgccgacgaggaaggtggcgagggcgaggccaccatggtccacgatatcgaggaccagttccgtctggtctggcttaaggctgaggatggcgcgaagccctccaaggaaagctacaagactcacttgaagcgtatgctcgtcttttgctcctcacttgattatccgcgcatccactgacttctgttctttaatatagcctacctcaagaagcttcacaagaatgcgtcgcccaagttcgctgaggccgctgatcctgaagccgccgagaaggcctggaaggccaaggccgccggagctatgaagaagatccttgccaactgggacaactacgatgttctcatgggccagtccacggacggtgaagccatgtaagctcacgtatcttcccaattttttttgaatattcgactaatggtttctaggcacgtcctgattgacttccgcgaggacggtgttaccccctacgctactgtctgggctgacggcctcaagccgattaaggtctaagcaactcttgtcatcccaaagaaggcgatagttaaaacatacgcaccctacacgaacaaatacgtcttgttggaagaattgcgagttacagttcagacgcagcggctacttattccccttccctgggcctgtctgttctaataaccctctcgcattttgtatccccgagttagtgatccactgggtccccaagagttacgcttcatgaaatcatctgtcatgtcttactatttttggcttgtactatgtaatctgtcttctgtcattggtccagtccttgacagtaactcccttgacttgagaaaagaatgagtattgagaccacccgaaaaaacagtttcttacgataaaataagtaaagcgataccaataattacagggatactagttatagtgagttatatttgcagatcatttgattattcatcactcataataagcatactaaggacatcccggccaatcacccccattgttcccattccaggacggaaaattcccttctggagggcaacctggaagtggaagaccattggcatctaaatcaggcatgttgatggggctagtaccatgaaatgttgaggtggttaaatcaagacctgagacgggatccagttccatcagatcatctgcgacaggaagatgttgcccaaacactgcatcccactgatcccaatcgaagttaaggttggggtcaaccatcgatggaggcgtagaaattctaggtaaaccattaggacaaacaggatccacgaaggacatgccgccagcagcagtaatatcagcgtctgaatgctgaacgtgtgggacagaaggggtggatgcagaacattgtgtcggtggaggtgcgccaaacaaggaatccgtattgggcgaagaggcgccaatgcggggaggtatgagatgattggcggggggaggattgaattgggaatgtgagactgggggtaagtctttaccccgtggttggtattggcatcgcagagggcttttagtagcatccggggtaacaggatccgagaacttgtgagagcgggtgaggttgtagaatgttttgacgaaatcgctaggttgggatttgtgtgttgagggatggccggccgatgttgaacccgaagagtcggcctgagagtgatctgagctaggagagtgacaatccccgcgagtgtcaactggcgaagcgaccccagcctggatctggtcttgttcggtccagagcattcgcggattgaggcctgccttttgccaagccttctgacgaaggcggcggatcatatcccaggcttcacggccaccgtccttcagtggccgttgtgttgaaacaccgtcttcaccacctacgacgcctccatccgggccagaaagtgcgagtatgctgtcgatgaacgcgcgggacttaggtgcttcagggctgtaaggtcgctcatataggtcaataagcatgatcctgtatcttattagcgtgatcaccaacacctaataatggagtcatacatagtagcatgcattggttgatgattactaaaaatgaatatcagttgcccatgattcctggccaccatactagcggaaaaacttacccaggccagctccaatgaaagggctggaaatcaggatccgttgcgagttggatgaatttttccatgaaaccatggcaatgacgaagtgcactatcagtattagcacatatactcatttcccgatggtgtgtgcaaacctttggcgtgccgctggccaaatccggctgcgagcattcttcaggaaaggctgataggctacgcagaaggcctagaggaaggttagttgaatacgaaaccagcaaagagtgagaaagcgcaccttgtcaatatataaagaaagaatgatcttcgcccatttatggaagcaaataagaaccggtgagtgatattgttctgagcatccggtgggaccttcgcctggaagctctgtgtcggaagagcggccatcgggggatttggatatagagaacgctcgacctggcgttgacaggttgtcaacatctttcccctctggaatcctgttgatgatggaattcagtctcagctgcaagtcaaggagtattgaccggagctcctccatgtcctgcctggtgaggggctttattccaagttggattttcaatattcggcgaatagcgcctggtaaagattagtgggtgggttttcaggggtttgaaacgaaaaagggtacacacgagccatggtatatttccctctggcggtcagatagtagacattgaccattgatggtccgccgcaaatagtgggatcatctggattatcaggcagccgctctcgcgaagcaacctgtttcatataggactctgcagcggggctacccagcatcgtatctttcatctcactagtctcgcacacatcccaataattctcgtcgttgacaagtggaggcagaccgcttgacatcgcaacgacacagtccatgtggatgatgtgccaccataaacggcgccggtactcagcttcgcatggctctatgccaaacttagcgggatcccgatgcaagcccatggtttgcgcaaccctcatcgcaagactaacaaagagactagtcgtcaaaggctcctcctccttcgtgacaattgtctgtacgagaagataagcagcgaggccttgaagtgaagggctgcgcgggaatttgatcttcgtgagccatttagtaacttcttcagtatagattgtcgaaagggccgaccgcgaggacacattaaattcagcttcgattgctcggatcgaaatagtcactgagccgccataccatatcgcgtataacagtgggatgaatgacggatttgggcacgactctcccgaatagctgctgtagtcgtaccaatcccagaaggaattgtagagcttgaggatagttggggggtgaatgataggactgatagcgtgtacaccggaaataaatcctttgtaaagaatatggctttgccgtctcgttggcatgtgatcaagcatttctggctccaccaccttttcattgatcgagggggagtcacccgaagggaagattatagattgttggaaggaacgagacctaggcgccatcgaaggtgccgagctgcctattgattctctccatgactgttgaccatcggcatgcgaatctgttatgtcttcattatttttttcaggagtagactgatcatgtgagctattttggtctctcagtaattgattgagctcattgatctagatgcgagttagtcaaactgtctgccagttggagagtcgagtgagcagcatacttcgccagagatataagcccaatacgtggtgccaacatatctatttatttagggttagaaaaaaagatttgtattctcaaatgaagcaattttgaccaaccttgaccttccaccgtcctctaggctcaaatggcctaagttcaaactgccaaccgggtctaccagatcggtggcctgaccggatgggattggaaattcatcgctgctcgattctgcagcaatgcgacgtggactggtagatcttggcggtgttttatttccgtccagactattgctcggccgtgagtcatccaactgtgtgggttccacggccgttgcctgtatctctacgtcctcgagtgtttgaccgttccttccgaggcgctcaatcattgacataagcttatcgagtcgtgattcaatggcgcttgggtcgggcttttcgcctgtcgactctgcccgcttcaagtgtccgtaaagtgattggagctcgtcgacgtcttcctccaatgtccggggcatctctcttcttcgtttaatgccgtgtatattttggggagacccatcgcgcctatcgtcatctttttgggatgacacatcatatatacactcggtgttgttcttcacacaatttccacatatagggtgtatctagaagagatatgttagcctgaaacaggggcttgagtgttgatggcaggcatatcaatctaccttgtcgcatttgaccttccgacgccgacacgtgtgacagctgtagctcgcgcgatttcgggtgatctggcggcctccagccaaaggtcccttcaatgatgacggagcagacgagttgccagggatggaaggacccgatatgggctgagcattgggtgggctctggttcatagtccctggcaagacatgaaaatagatcaaattgttagcatgaaaacgagacgcgcaaaaaaagaaaaaacggcgcttcgccgactgcgggggttccctgacgttatcggagaccgaagcccaatgatatcactccatgccgaggtcagcattgatgcctgaatttgcgggcaagaatatgatttgttgccttgctgtcactagtactagggcttttttttttttttttgccaaatatgccagtaaatttgtctagtttttgatgtataatcttccatctgtgcgcaggagaagcctttagactactaacacgtttatggcaagatatcggggcaagatcttttcgatgcctttcctgcgctgttcaatgctgtgtgtgggtttgtcaagaaagctcagaccaaaagaagagacaaatattcaataaaatcgtattacatgtccagctttacctaggaactattatgacaggaactaaaactgtatgtctaagccactgtcagaagtcggacagggattctagtgtgcaatctgtgatgatctatagattgaaaggaatctttacaagacatgaatgattcaaaagcagatgttccatagagatctgcatagcgccattttatttcgggctgtctgcagtgttctctcgtagttctacctgaaacccgacggtatactgcagtattgggctccttgtttctcaccacacacgctaatgcaagagcgcctcagatgatgtctcgtagccaaccaatccaaaaacctgaacgctagccagctgtacattcccccctccccccctcccaaaagaaaaaagcaccaagtggcctagaacttgggattcgctgtaaaaagaataacaagcctaacatttaaatcctgacgatttcccacgtattttcctagacaatattgcatcgaaagctaaataatattcacaatgagttttggagtgagcatcggggacttcatttcggttcttactttggctaataagctccgaagagactttgttggcgctccgagccagttcaacagtatctccagagagtgcgtcgatattgtacacctaggttgtcggccagtaactgataattttggtcttacagggtcagagggctggcaattattctccaggatgtcgatgttcaactactaggccatgatatcaatgatcaacaacaaaaccaactagggcaaatcagtcacagctgtgtgatcctgctgaacgagcttcaaaatgctctggagaaatataaactcgttgaatacagtggcacatcaattcacaaaaaagctagaggtatttggaagaggattgtctgggagccggaggacataagtgagctccgaggtcgcctaatgtctaatgtgatattgctccagtcatttttgagtgctatatcaaggtatcatatatacttctccccttctgccccacctgccgcacctaagcatgaccaacatctgaaatccatagtcaaacgatggccgcgacaaagcaaacactggaacagctcaactaccgacaagaaggcaatgaaaagtcttgcattctcgactggctgtctgccgtggattacacgttacagcagcgtgatcttctcggtcgacgacaagcgggaactgggaaatggcttctcgattcgaaagaatataaactttggcttcgaacacgccgaggcaccttgttttgtccaggaatgccgggtgcgggaaagaccatctgttctgctatccttgtggatgatttgactacacgctttgaggaccggcccgatgtcggtatagcctacatttattgcaactttaaccgacgagatgaacaaaaagccgaagacttgctttcaaacctgttgaaacagttgagccagcagaggacaccccttccggatgctgtgaaagacctctacaagcgctgcaagactacatcgactcatcctcgattcgatgcaatatcgaacgctcttcactccgttgtctccacgtattccgatgtgttcatcgtcatcgatgccctcgacgagtgcgaaaaaatttgccgtacgaagattttggacgagcttacaaaatttcgtgccggggccggagcaaatgtcttcgccacgtcaaggcctacggatatcgatgatttgttcaaggggggtggctttctcgagatccgtgctcacgaagacgatgttagacgttatcttgatggtaatatgttccgactcccgggatttgttagtcgaaatactacactgcaagacgagattatgactgtaatctcaggccatgtacagggaatgtgagtctactttataaaattgattctccgcccaagacttagattgctcatctatcctcaggtttctccttgcacagctttattttgaatcattgatcggcagaaggtccgctaagtctactcgaaccgctctgaaggagctttcggatgggtctcatgactttgcgtacgacaaggcttatgacaacgcgatgggccgcattcaagggcaactgggagagcaaactgacttagcgatgcaaactctatcttggctcacatgtgcgagaaggcccctcacttcattggaactccagcatgcacttgcaatagaagaaggagaatctagtcttgatgaggagaacattccagatatcgaagacatccttgccgtttgtgctggtcttgtcaccgttgaaaatgaaagcgggataattcgactggttcattacacgacgcaagaatacctccagcggaagaaatatatgctcttccccaacgccgaaaacaatatcagcacgttgtgtgtcacttacatctcattgaacacatttggatctggagtttgtgaaagcgatgcagcgatggaagagcgcttacaatcatatccgttctactcttatgcggtatgctattggggaaaccatgtgatagcagtcaaagatctgcatccagacgtgctagagtttctgaaagatcagccaaaagttgaagcttcagaacaagcactcacagtgactgaggatccaatccagaaagattggagccaaaaatattcaagaaccatgactgggctgcacctcgccgcacattttgggattcaaggagcagtagcctactttcttgaacatggttgccctgtggacatctgttataacggcggttggtcagccttgaaacgagccatttcaggagatcatttgagcgtcgcccagttccttctttctcatggagcagatccaaacgaatccggtccggacaacttgaccccgcttttacttgctacccagtatggtcaagaagccattgtcagacttcttcttgaatggggtgccgacgtgaactccccgtgtagatggtatggaagtgcactggtcgcagcatgtgacgagggccaactgaaaattgcagagatattcctcaacagcaaggcagatatcgatgtggatagcgagctgtacgggagtcctttagaagctgccgcttcggcgggccactggggactagtgaatttcctgcttgaaaggggcgctgagcctaattccaagggttctgatgttgacaccgctttgcaatcagcagcaatccagggccgaggagatattgtgcagatattgctcaaccatcaggcagatgtcaatcgacaagcagggccgcatggaaacgcactgatagcggcttcaatgaacgggaatcagcaaatagtgcaaatgctcctcgacagcggtgccagcataaacacggaacatgagcttggcacagccctgattgctgctgtcgcaaaagggcaatgtcacatagcaaagatgttactcgacaacggtgctgacgttaatggtcgcggcagactacatggcactgccttgcatgcagccgccgcgttcggaaatagtgaaatagtgcaaatgcttcttgatagaggcgctgacagcaccattcgtgcgggtgtttacaaaacaccccttcgagcagccatgacgagaggtcatcatgaggccgccacgcttctcaaaagacaggggcagcagttgagggtctgaactttgagtatgcatttgcatggaatacattatagatggatttaaggtatagcagaattcacggtacttggtgttatttttctcttgtttgttgttcggtagtggtgattctcctcctctgatggcaaagcaaagtgtgtggatagtcaagggccgactgaactttacattctgcgatctcctgagaggacccgatgccactcacttgtcagagaccctgaggttgtctctgatacagcaacccctattttttccactataaatggagcactagtattatctgatcgctaactatataactcgaggcaatgaaaagttcacgatcccgtctccaggttatgaaaaaagagaagtcaagcattcactatgacatcattttataagcaaaacctccaatataagttagccactcattgtttatttcacgcccttcgttcaagtgtcaacatggtacctcggcgccacatagccagtactactggtgtcaatccacagctaatatgtcttctatgtggaatgaaactcccatacacgggtaattctaggattgcaaatacaggcgaacgtgatcaaatactcaaacagcaatagaaaaagatttggagagcataacatgtgatggtaccatctcgcgaggtagaaaagtcagacttcggcaattttcccacggatatggtcatgcttgtgtcgagtcagtaaggtctcaagggacttccaatcaaatcttcccagattctctaactaggacagtaatcaaggagtctgataccaaataccgtcttacgggcattaatatactcaaccattctgcagaaagcccttactacaccccaaatgatccagaaatggcaagaatcggtggaaggaaaggtacagccccggatcaagtcggcaatgaagatttcactgaattctatggtacaagcatcggaaggcagcccagtcaatacaaagggaaagtggttggatatatcatccatgccagttgctgggtgctcttcaaccaagtcgaagggctcaaactgaaggaggctaaactcgcgaaactcgtccaagtctgtcggaaacattggcgcaagaacacaatgtggaggttatatgacaacaacgtgcgttttgtacaaccgctccaggacctattgcagtatgaatacggctgcgatatctatcaaaatccactagtgcccaaatttcaacaagccttggattgcgcagatgtcgaaagcttagaatatcttcccggtccagcaacattccattggaagttgccattctgattgccgagtgggtctgtcctattaagcataccttgagtgatataaaaaacacggggaatatgcttttggtgtttgggtggaatttgcctgattggttttggcaaagacgattggacgaaggattgttcattgaattggataaacttaagaaggagatgtctccagtcggttggcaattgcggctgaatttgatgtgtcttgttgtgggtagaactgagttcaggtccagtagtggtctagcaagtcgtgaacgggtgttgaagagtattcttgctcttgaaaaaccctacttaactctagaatcagccaaggagaaagcgctgatcgagaaggggaagaagaatgaaagtcaatgattgctttgcttgctaagttattcctagtcgtcaattaaagatgtccaagtgaacaatttgcccttttccccatcgctcgagggagatagaagtagaaaaaagcaaaggcacatcctatagcaccttaatttacatgtaagacgagggaggtgggtaaaccatgagactgcaaaacttgtgaacaggatatgatacaagattatgaccgctatgaccaacacgtaatcactcataaaatacaataaatcgaaagcacacatcacaccagactagccacgcttgacctcttgctcgagcttgtccaaagccttggcgtatttgggcttgagtgagtccagtgcgtcggccttgatctggacacgatcgatgttcgaggtacgcgtgatccggccgtccacactggctgcgatctcgttggcaaaccagcggccctcgcggtgagcaaccagggtccacgcagatcctggccggccagcgcgggcagtacgtccaactcggtggacgtatgtagtgatgctggtcgggatatcgtaattgatgacatgagtcaaagattccaggtcaagaccacgagaggcacgatcagtagccacaatcaccgagatgcggccttgtcggtaagccgtcaatgtcttgcgagatgcagaggatttgttagatttaatgatagttcccacacgcttggccaatgcgggatgcagaagcgaaatgagacgtgcaagtcgggaggcagactcagatgatttggtgaaaatcagaacagtcttacgtgcgggtgagggaacgagttccatagcatcggattccgagtcagatgagtccgaagaatcagaagaatcagactccgagtccgagtctgacccagaagatgaagtatcgtcatcagatgatctgtcagagctagtatcatcatcagagctggtatcatcatcagaactggtatcatcatctgaactagagctgtcagagtcggatgaatcagacacgcttggagctcggcccccaccaatctcgatgtgagaaagaagaagacgtaacagataaagaggtttgagagatccatcgccaacttgaacaatgtactcagacaaagttgggggtagggcgaagtgagaatctgcatgaatagcagacgggtcatgttcgtctgcagcattctcggacccgatgataatcatcttggggttagcgagacgcagcgagttgagtttagaaatatctcgggtcattgttgcactcagaatcacctttcgaggaggcttggcgtcaattgaaagcccaagttcagacaaaagcttcccaccaggcccaaaggtctcgggagcctctcgactattcagcgagttcatgacaacatcaacccactcttggaagctctcattcaggagacgatctgcttcatcaatcaccagccattcgagatgcttgagggtgaatcctttggtatagcgaatgtggtcaaccagacgacccggggtacagataagaatgtcgacattcggctcggactgctggatgtaacccggaagagacgcatcagagtcaatcgcctcactgacacaatcttccaggctcaagttcatccagtcgtttcctttcaatccgtcacgctgttgctgttggagagccgggttgtaaacctggtccacgcgcatcaagagtttctgttcctctttgatggctacattaccgactgcgcttccgatatgaagtctagatccagaagcacatagttcgcaggattcgcgagcttgtttcaccaactcccgtgtagggactacaatcaatcctcgaagtctggaggcaggtctcggcgacagagcggtaacaagggggagaacataggagagtgtttttccagatccagtcgccgcagagatgcaaagatctcccgggtggttttgctctccttgtagaagaaggggaatgacggtagattgcacagcaaaggcttgtttgtagttctgttgttcgaggattttgagaaggtctggctttattccgagctcggaaaatttctttgtatcctgagctgatttgcgcaacggatttgccagccaagcgggtagagatgaatatgttgggatctgctcgggctcgggcgggttttcaggttgaggtagttgttcaagaccctgtgcgtaaacagcttcgacagtaggtgtctcatctacaacggcttcgggttcaaattttttggctttagcgctggaaacacttttggtgcgctcgaactttgacataatccccgagtgcttgttcttcgatttaggttgttcggcttccggtgcttcaacttcttcatcttcatttcctgtagtcacagacgcagctgcatccttcaatgtgtcgtccgttccagagcttttccgcttgctctttttcgatttctctgccgtttcgctggtgccgttgcgcgggtttccaacagtcgcttttgtgcggtctgagagagtagtatctttccggggcgtttccggggagttcgatccttgaagcgcatccttgagatgcttgcgcttcttgatactgccatcatctgtgacctctgcgatcggcaagccttcgcgtttcttgtgtttcttcgttggcgtgggagtggttgcaggctgagagccatgggcatctctcttgcgcttgtgagactgagtagattgaggagtcgcatcaaaattattagaggactcgagtcccgaatttttgccggccattctctcgtaattctgccaatgtcggggttgcgctggatacctcgtggggatcaaattccttttctgaatcttttatgccggcagaagacataataatatcaccgccctagctaccgcccttcttatcgggacagcttccagatgtctccagatgtctccaggtctcctgtatttattggctttcatggactggtgttttgagcagcagatctgttagccatggaaaggaatttgaaaagaagagcaaattcgatacctcggagttctcgttctcaccctgagaaccacagccacgatgccgtataacatcgcgtgagtatttgttctatctactagtcgcaatcacttgctaacattgatatggttatagaatggtcagtgacttcttttttccccagtcaggtaagcctcttcttttacgtgtagtttatacaatcgctgacttttctaggtggaattgagagtcacatataccaattgtcatctgtaagcacgctaccttgccgctctacctgcgctctctaattgctcctcagaaactcattgatcgaggacacaaagtcatcgttattacccatgcatacaaaggacgcaccggagtccgctacctcaccaatggactgaagatttaccacgtcccattcttcgtcatctatcgcgaaacgacattcccaacagtcttctccttcttccccatattccgcaatatcgtcatccgagaggagattgacatagttcacggccatgccagtttgagtagcttctgtggagaagctattctccatgcgcgtactatgggactgcggactgtcttcacagaccattctctcttcggatttgctgacgcagcatccatcctcaccaacaaattactcaagtttacattgagtgatgttgatcatgcgatttgcgttagtcatacttggtaagtctcccgccaacgccctggatgactcaactgacaagtttcagcaaggaaaacacagtccttcgggcttcgttggatccattaatggtgtcagtcattccaaacgcggttgtggcggagaatttctgtcctctatctcatactactcgtgcacctgatcagggcctgagctcccccgccgatgctccaatgtccccgagacaaatcgggcccgatgatccgattacaatcgtggtcatctcccgacttttttacaataagggcactgatcttctcatcgcatctattccgcggattcttgcctccaatcccaacactcgcttcattatcgcaggatcaggacctaaagcgatcgacctagagcagatgctggaacgcaatgtgcttcaggataaagtcgaacttttaggttcggtccgacacgaggaggtccgagacgtgatggtgcgaggtgatatttatctccatcctagtctgacagaggcattcgggacagtcattgttgaagctgctagttgtggtctttacgtggtctgtacccgtgttggaggcattccagaagttttaccccagcatatgacaacgttcgccaaaccggaggaggatgatattgtgcttgcaaccagcaaggcaattgcggctttgcgttcgaacaaagtgcggacggaccgatttcatgatcaagtgaagatgatgtattcatggcgagacgtagccgcccggactgagcgcgtgtacgagggcattactggcgatattagtccagaagaattctatggttactatccaggtcagggctgggaagcgagcggagatcgcgtccgcagctttgcgctaattgaccggctgaaacgttactacggctgtggcgtttgggcaggcaagctcttctgcctgtgtgtcgtgattgacttcttgatctatgtcttccttgagatgtggtttccccgagccaacattgatatcgcacgaagctggccaaagaagcagccagcgagcaaaactgagagcaccagaagtggtcgctgagaattcgcactccacccaatccttagcgcagaaaggaccggcctgtcaatatctttttggtcgactctcggttctccgcctgtcctgtttgtctcggacagctcataacctcatttaatcacccctcttcacgtcctctcgtgttgcacgacccattttacacattctcatccataatacctcatacataatgtctacttggcaaaataaaatgcctgaaatccttcctgcggtggtgccacctgcctagatggctggtggctgatagttgaccaaacttcacatcgaatagactccattggtatattagcaagaaaatgtaataatcaagaaccaacgccattatgcacctgcgtttgacatcatgtacgagaatgatcggctgccccaactttgaatcaacgcatcaccggaggcctgccctctttattccacttgacgcggctttgtacccactccacagccgcctggacaccagatccaagtagcgcgctgaccggcagcacacgactgtcacggacgccacttcctgtttctccctcaaacaccttccggacaagcccttctttaatgcgaaccacctccacgcagtcctcacggtcctgcttatttgccaacaccaagataggaacaccagccacatccgcattttgtaagactgactcgaggacttggcgacattcgtctaatcgcccgaactcactgctggccgcgttgattccgacattttgctccgagaaggcctcggcacttgcgctccctcgtgtgccattgcgtgcaggacctgccacggagcttgcgcgccgagtaagtcgcgcgatatcgggatcttgaccaacgtcggaactatcgaccacgaagatgatcgcgtggcagctagtatagtagctctgccacagaccgcgcatagagatctgacctccaacatcccaaatctttaaattcatgtccggtaacgctatcgttgcgacattctgcccgacagtcgggacggtttttccggggttgggtactggggcgccatcggagcggggttggtacagtgctttgatctgggagaggagtgttgttttgccggcattatccagtccaagcagaatgacagaatactctaagtaggttaggataatcagcgtagaaggtcatgcgataggagagagcagttaccttctttgctcgtggcggctaagtacagcgacttggccaggtgatacatgatcgcgttccctatggggagctcaaggccaagcgcaattgcaattatagaaaaacgggaccggaaacagaaatcatgacatcgcagtcagttttctgacgttgaagcgctcttcccccggaggggcccgcgttgcagcctcatccatttcggggagttagggcttagggctgaatgtgatctggggatgttccagtccgaactacatcgggcatttcaatgtacctcacagcggtaaaacagcgtgcattcaacactttcaacatttccaacgttcaaatatgttcaattccataacttcaagaaatatgacgctataatgatggacgccacacttccccggcatactcctcgggtccaggttcccaactcagtctgtcttccaaggtggcaaatggaaaaccgtcgactttcccgagtctcctcttctccccacttgcaaacactccgctttccagggtttgtcagcttttaattgatcggcggacctgacgataggaagccaatttgtcagggacgttgacctttccctcctgaattccctgggatacaaatgtcacattcctctatggccttgctgtcgatccctggtgagaaggcagtgtgacgaggatctcaccctgctttgattggatgatctaccctttttttttaccctatcgcatgtctataccagtatgccacacgctccatcattttcttgatatacatcgctgtcaatggagattgacactatcatcgtcggtatgtctatcgtagttgatgaatcattttgaggccattcgagacttttcctctgcttgagccccacaccccaccccgcgctgctaggagtccttgcgaaatggtaactgattgaaccgattttaccaggcaatgggccgtcggccatgatcctttcatacatcctccatggacatatccctttctactcatccgatcctccacatcccgatcatttgttggacgccaagttgaaagctgcgccagatattttgaatgccgatgtgaatgctcttacagcacattttggcgcctcgcgcctatcgtactcgacccaggcgcttcccgtgaatgttttgctagacacacttgtacggccaagtgttgatgtagatgagcccggctgcatctcaaatattgattggcgctcacagcctgagaaggctgtctcacatcttgtttttggaaagtccttgaagcctggaggccaatggaccgaagatccatggggcgcgagttgggatatccagacgttgagttatgcggcaatgctgtccttgcccgggtactcctttgccgcccatcacaaaaagaccacaggcaaagatttaccatcatatacaaggcccacgcgccgcgagattgcggattattttgccgcttatccggaggctgcgcatatcgatgatgcttttcggtgtggcgaagaattgaaaggcatttcccgcaccgctactggattttatgttcattctcataacatccactgcaagcgtctggtcctggcaagtgggatcttttccgaaatcctctcaccagagccggtcttacgtccattacttgagaccaagtcctcgcctaatgtcccgctagtcgttgttggatctggcttctccgctgcggattctatcatctccgcctcccctgaccaaaagattctgcacatatacaaatggtcgcccaatgaccgcccatctcctctccgggcctgccatcagcaagcatatccagagtatgctggtgtttaccgtcttatgaaacgagctgccctcacagccgaagctgctggtaaaggccagcggccaaagtaccgacgcgcgacttcaacgccattccttgaaagccggaattgggaagacctctatgaaggtctccctaatgttgaagtgacgaacgtgaaagtccacggcgacctggcgacggtcacattccgccagcaagatggaactgtcttctctcggaccgtggccggcctcgtgtatgctgcaggccggcggggcacgctagattaccttgaccccgagctccgctgtgaagtgttagggcagggcaatcaagagaatccagtagtcaccggtcagaccctccgtgcgaaagcaatcgaggacctcgaggtcgcaccgggagtttacatcatcggcagcctgactggagattctctggtcagattctcatacggcgggtgcgtgtacactgctgggcatttgatagacggcgagcgggacagtcgcagtgtctgtagtagtctcacgctatctgctaaactacatggttcttcgctttccgtgatgaacggcatggacggacaccatgtctacccgaatgacaacacattggacctggctcgcgaagataccttcagcaaaatgtcaaccgtcacgaaccagtctgttgtacgtggttggtggaagacactctcccgcatgtggagtcatctcacacgatgaggatttcgaaatacgttgcatgtacaccacgatccccaaatgtaaaattctagacacgccaagaaaggcatatatattgtttatctatcttgtttctaaaggattttgttccctgcgtgctcctccaaactacaatgaaacctacaaaatcccaaatccaagatgcagtagaacatcaaatgaaactaccgaagtgatattgacattcctggttagacaagagaggtaagcagtactagcgatcacctaaatttcggtccatcctccttgatcatatcagccgctttctccgcaatagcatacacagtagaaatgatgttcccactgatctgcgacggaaaaacgctcgcatcgaccacccgcagtccttccaccgatttcacccgcagtctattatcaaccacaggacccattgcgcacgtccccaaaatatgattgaagggcataatccgctcacgggcaaactgctgagcctcagcagggacctgcaagttcacagccggcggcggatcaacacgtcccagcacactgccagccacatccttggacgagaacaccttgtccacgaaagccaagccagctgccaagacatcaacatcggcctggtgcgtgagtatgcctagatcgatatcagggggtccttggagggatccccttggtgatatatgcgtactgccgcgcgaagcgggatacatggcactgatcaacatggtgtagcatgcattgcgacctttcggtgctcccggcagcagcaggccttggttagaatggccgctggcgagattgaaatggccgggaatgccgtagtattggatcgttgcgaagtcggcatctcgtaggctggatacgatgtgcttgcgatagctttctcggaatttgtccccctcctctggggcttccacggcggcgactgtggcctcgattgccgtctttgggacttgggatgcgtagggaaggaaccctgtcaggcccatgcagcctgcgaggagtccgttttgggtgtctgccaacagcttggtttgttgctgaagaagattatggtctagaaacaaggaatccatggtcacaatatccggcacgagttcgtatacggcggatgtcatggggtgttcttgtaggttttcccccacggcgggcaggtcgacgattggatcgatgccggcagattgaagaatggctcggtttccaattccagagagctcaaggattcgaggactttggatagtgctcgctgacaggatgatctcttggcttgctttgaccttgtgctgctcgcctccgtgccaaaactccactgcgcttgcccttgttgcctcaccaatgtggtcgaaaataatccgactgacagatgcttcggtcaggattttcaagtttggacgttcgagggcagggatcagatacgcagaagcagaatagctgcggcgcacttgcccgccgctgcggtcaatgtttgacaggctttcaaaagcgcctatatgttggccaccgtaaggatcgtcggatcttggaatccctgaagtgttttcgaggcctgtgaaaatagattgctcgaatggaattggcgagggtggcatagagagtcgaataggtccctcttgcccatgagaagctgaagacaggtgtactaaattttttgtactattcagtgggtgttggaggtcttcgtgcttcaggtagtagggctctaagtcgttccatgaccatccggcattctcttcaccccacgaatcgatatcagaggccgatggacgaacgtaggccatgaagttgacggcacttgagcctccaagcaacttgccacgggggagatgatgaatttcgtccttgttccccgcctggtttggttcaagggatatgtcagctcatgtacttatttcaaattgattaggcttcccgggcatggaagggttatcgtaacaacgccaacatacttgcggtattgtcttgaacttccaatcatactcttcgttatgcaacatggccgatatgccagtcggggagagtacattgttgtcgtccagcttggcttttccagcctcaatcaccccgacaacgacattcggattctcgctcaaccgattagcaaggacaagtccagcagtaccaccgccaataatgagataatcgaattccgtggctaagaattcgctacaagtgggaaatgagtaatcagccttcatgatgagcagcagaatgtatgttgtcgttgaaagtatatacacaatgagatctgcagaggaaatggcaagctatttatgctgatactaagtcagagtcgtgtcgtcatatctacaaggccagagctgtcagattataaaccccgtactccgtactccgtacatgcctcttatactccgtggacgcctgaatgcggaattagtatccgggctgtcagaagtggagcttagggtttcgaccacgacgatggtccggtaacatacaccgccttacagggtcttacagacagtgtatttttgaaacttgtatccgtacctgcagagtcctgcagggtcccgaccgagaaagcttagccaatcatcgtacaagcacgtggttgtcatcagaaatacgaaaacgaaagttaatgatcgggatttgtaagagagtggggatctgacggggtctgacttgttctaagaccatcagataaaaaaaggactccacttccctgcatgtccgacttttctttccgtagacctattaaggacatttgtttcaccgggcaaatttggcataactgctatatccttggttttttatatattctcggggaataaggaggtcgaagcacaaagcacttctatgattccggcttcctgggaggtaccgaggtacaatggactaaatctcaccgcggccatccagttgctattccggccttaaaagtggagaaaattgcttgattggctgattcttggcattatggacagtgacatcgatcttatctcacccctcaacatcagttcgcaccgatctttgcttaattaagtaaaaggacagtccattacggccgaaacctttcattaggtctagttcatagatgattatgccagatgcacagatatctactttcatcctgctaaatccgaacatcgtggccaccgggcaaccttggaaagcatcagcgtttctaattaaattgcctatcctagcttacggcggtgtgacagtctgataaaaatagtagttagttatatagtccgaaaaatgtgtgactaagtaagactaagaaatttactgtggggaacaaagccacatgtaaatgagggtgctttttgcaaaatagacaagttacttggttatccatctaacccaccccaacgaggtacggagttagagccgaatatagattaatcagaccattcggtaaagtcgggacttcagcctatctcgtccttctcaacttatataaagccaggtacaagcccgcattggcatgaatcttaaaaacaagccactgttcaactatccaaccatccaaccacccaaccatccatcatgcgtctcaccgtccttctctacgctgctcttgccggcctgtcgctggccgctccagccgaacccgccgaagccgccgatgctgctgccttggacaagcgtcaggcgagctgcgtgaccatcaggaaccaactcgcttcctgtgaggctgaaggcaactgtggcactgtcatggcccagtgcatcgctcttcactgccaggtgagtttgaatttaaacgttacgaattgtgcccacatggataactaactcgaaaatagcactgcgccaacttctagttggggtcaattcctacttctcttccaaccgaggtcgatgttgataaggtataagcccgtctagaagaggtagtccctcgcattcgctgatgattcgtctggcagctcctgcgggtgtaatgcccttctcggaaagctggacatatagagaaaatgggggataaaggccgaggccgatttaggcttgtctaggtctctgcaaatgtttgatttttggtccatagggctttccgatatcttcattcaaatgcagtgactttttacctccgctaattatacgcgctgtttccaagtatcagaatcaagcttgtagagattcatatatagtttgtcccactgataataaataggagtgcgccattgggatatccctagatcgagaacgatggagtagcctcaagtagaactgtttagctgaatacatgtcgtagtatttgcactgattaactttgcactagggtggtatgtatgaattgttacgtgcgggggtcttcaggaaaaatagtgcattctaactagaatattgaacatgaggggggaaggaaaggaaaagaacagggatcggggccattgtaggcttttgtgcccttgccctgcaactggcttatggatcaggaaggaacgactcccacaggaaaggaaggaaccaacgagccttgatcgaaatatatatcaaccctccgaacctccagttttattgtaatcagcctcgaagcgttcgcaagtctgaacaaatgacgtatcctgctttctccatatgacccaaagccttccaggaagacaacattatttaaggaagtggatttcttgaatcacgactcatggtggcattagtttactcatttttgcggcaagggtagggctttcgatggcccacatatatatatagtgctagtctcaagtaggaaaggcgggtgatgttccgcatggaacccgggaagcttagatatgcttattcgtatttgctgttggtcattgctcctttctcttattggggcattgggtattgtggcttggctctgatttgaaaatgatgttcagcagggcttttttatcaggttagaattactgatctcgtgaaatcaatggaccggagcgtaatccttgtatctgaatcaacaaccagaaccatcttcacgtgataagactagctacacttcctacgatagtagccaatgacaccgagtgtggtacaatctgttggatcatattaagttctcttgttgagacaactgccagcattgcattcacgaaatcaggtagaaatgttctgccagtatcggcacaaatccttagtgattcgcacgaatgtagtctaggatttgctggaacaaaacatcgtcgtccaccaagtgatagatattgccactaggatagccaggtagcccccaattgagaacacattcgttctcatcgtcgtacttgaacactctcatcaattttccgatggcgacaaagctgtaaactgggcggcggagccagattggacgtttgccgtgtgtgtcgctcaggtattgagtcaattggttcaccccttcctcccaacccgatggccgggcctgtaggctctgtctcttgcattggacaacaagaaagttcgtgggaattgttttaaaatccatataatgatacgtatggaataagagttcattttcgccatggaagcgggtcacgtagccggcagagcagggaaattggagggcaagaatagagttccaaactccatagattgttgcatcggggtcgtttcgtttggtacgatcgatctcttcgtagatggcacggatggttaagtgctaatactagttagcagcttgcgagtaaccatgttgataatacttgacttaccgtttctgccatgggaggcaacaacctagcaaacaaccttgtaacaaaggaaagaagcaagcatatgtcagcgatcataaagtcatatgatagacaatcatgcagatggttacaatagtaactaatttgtttgagagaaagcgaggattttcgattagagggatattcgccggcttgttaataaaatccctagcctattgtgtcgtctcatttagactcccgaggccagtcgtcatagacatgctacctaatcaccaccgaaaagaccatagagacttaacataattagcgcctacatcgcctttcatgccttactcattgagactccgcccgtcttttgcccgccgttagacgcgggcctaaactaggccgctacactcattttactctccttgttcttcttgtttcccagctgcttgctatctagagtcctttcgcatttactggtcgatgccaatcgccctctcgtggataattgcttcttcctcttttccgtcatcgccaatgtcggcccccgtggcgccagtcactccctagccgtagcttaccgccaggacagcgacagcgacatctcaccgtgacctctagcacgcggagagcatgtcgtggcagatactctcgcgctgatcgaaatctcctcggacctcgcgaactgcgcaccgcttgggcggagacggggctctcggagggctggtatcgtcggtctcagcgggcaacgaggtagagagtagtgagcggccaagcttcccaattgactaaattttgcgcagcccttaattattagagcccggagattatcccccgtgctctaatccttgacatggacctcatatcaatgccacttactgcacctccctcgtgggggtataaaacagtcaaggttcgagagcctatcatccgcaccgtgtggcgatagttatgatgtgaaccgcagtctttctgtaagtgttgtttagatcaatgctcgctctgcgcgacacctaatgcatgaagtgcatcccgaagttatgaagccacttgaaaattcctcattgtggggcaccggcctccatcaacagcgaattattgccgatggtcttttcgtcaaggtgaagttcggcgggatcctgtataagtataagcagattatcgatgttgtccatgtgcgcagttcgtggtgcctgtgtgacggggtcaagcgcgaggctgttgtggtcgaggcatcgggtggtaagtggtaagcatccaatttgtgcagatttgtgaacaaacccaaaccctctggtcaagtcaattgttccgagcctcgatgttcaatcatgttttggcaccgtccatttgcttagcccatcggtctgtaaaagagtgatcgctgcatgttattacctttagagaacccctattagtcaagcgggatcaactcggcgcctccaaacatactcgtatcatctgtcctggggcgaatagggtttctgagtgcataattggtctgagatagtgcgttcgtatactttttcctagctcggagctccatttgtggagaaaaacgtatgttcaacacggccgctaatcccactgcggccagcgcggtgatcaagggggaattccgagtgttcatccaaggcagcggatagggcatggggccccgtagggatcaccggacatggagttcacgaagatatgaccctttgctaatttctggactgggtaaaccagactgtttattggcggggtgacgttttgagcgttgttagtggggggtgctagtgttgctagtggcgactatgcgcgttttgcgtggctgctgaaacttgtttgatcctgcaaaaattagtacaatggcattatggatctcgataccctggacaatccacttgagcccgcatacattggatacgatggtgatccttcatcgcactggtggggcaatttagtgaatggtttcttttctggcgtgggcattcattctttcaagcgacgttgcgacagcgggatagttggctttccacattaagccatctatttaactagtggtgatcttgattgcgtaggtgctaaaagaagaagtcgatacgttcacacgttgagattgagatgaaacagaaaaccaatgttgagcacctcgtcaggatccaggctgtcagagcttattattatcctccaatagaaaccacaataatacgccaaccgtttaagccttggagaaaggtaaaggctcgaatatgaggactagtcaccccttatccaatgcgatcagcagctaaccctatttcctattagggctgcatatacaatccctgtctctatatgctaggccaactactatatacttcaaattaactatgatctacgacgtactgtcccatggcttactttatcctagttatactcaaattaaaaatgaaacggttttctcatttccccccttttccccactgttattagcccactcgtttaatgtgaaatatggccccatacatactaacggaaaccggttggtcccaacggtcttcccccttcagttgccggtcgaaatgccttagacgccatttcgtactcatttcccagtgtagatctctattccgaatgtcttccgacataattactcccgataatcgggtagaggaccgtttcttccttatataacatctctcctcgtcctacgaatctctgatccatactttcctacacctcatttctaactaataatccctcacttcattctattccctgaaacatggctgaatccaccacccttatcttcgttcccggcgcgtggcacggccctgactactacgatcccgttgtggaacgcctggaagcagtcaactacaaaaccgacaaagttcacttgccctccgttggcccatccgagtatctcttgaacttcgatgcggacgttgcgcaaattcgctcccggatcgaacgagcagtggatgccggccaaaaggtcgtcttgatagttcactcttacggtggcttgcccggaagcgaggcaatcaaaggcctagacatcaagacacgcgagaagaacggtcttcccggaggcgtcacgcatctcttctactgttcctctttcatcatcaaggaaggagattcgctgattggtgcctttggtggaagtgacctcccgtggtttgttgtcagcgacgacaagttgcaagtcaatcctgccgatcccgtgggaacattctacaacgaccttactcccgcccagattgagacttgtcttgccgacatcaagcctcacagttatcagaccatgcacagcccttgcacctatgccgcgtggagagatgtgccaagtacttacatgtactgtcttcaggatgctgctattcccattgagattcaaaagggaatggtcgaaggaacagccggtggatatgacattaagacagagacagtggacgcatctcacagcccattcctcagcaagcctgatgaagttactgcggcgattcgtcgggctgctggggaggttgtttgattttttggatgagtttacaatgtgttgtgattcaatgttttgatatgagtgaatagcattagatatcagtgatgaatttacttggatgatcgaattaacataagaatatttggtatatacatgaatatcgtggaactaccccgtaaaatatataaggatgcccattaaaatcatatacctcacactatctaaaaaaatagatagctgaataattgatggatgttcttcttgagctccaaagttgtaccccgggcagcaattcggtggcaagtgaatcatggttacatcaccagccctaagaggtctatatagtccggggtgatttgcttatcaacttattattatagtgatttaattcttttttagcctaatattaagaacgtagagaggcggaatataaaaattccaaggtggcattgactagagctatccttctcatctcgactttctttccaactatcaaaagatgtggccagccgatgacccaatctcagcctatggctttacagccgttttatcatcagctactactcttctcgcaacagatcctccagtaacaccagccccatcgattgcagtgaccgaagtcccgattccagcaacgtccctcgtccagcgaatcaatgaatatgcaaaatctcatcttcctgagccgacatacaaccattcccttcgcgtttatcactttgggcttgcgattaagcggtacagattccccaaatggacctttaccgatgaaacatacttccttgcctgcctgcttcacgatatcggaacaaccggacctaacttagaggtcactaaattgagctttgagaccttcggaggcctgaaagcactggaagttctgcagaacctacagccttcctttgcaggaagcccggtcgcagtcgccccgaaagatcaggcagagagcgtggtggaagcaatcatccggcatcaagacttgtgcgagaaaggtaaaatcacagctctcggtcaactgcttcagctggcaacaatcttcggtatgttgaccctctatcagagttgattgttttggcataacatattattccttgaacagcgaccaaaatggcgtagcgctatttactggccccaacaagtgtacaaatgttggctctaacttgctggaaaacagacaacactggctcttatgccaatctcgttcatccctcgactatccgagatgtttccacccatttccctcgtctgaaatggagtgggtgcttcgctagtaccgttcatgaagagaatcggcttaagccctgggcacacacaactacacttggcgaagacgaattccccagtaaggtgctaggaaatactctgatggcaccctatgaatgatggcatctcgaggatttccaaagaatatctggcatggagctcataaaccttttagacgctaacaataaaagttgacaaccgagcttgcattcttccgatgacctatattttcacaaacatatattaggcttcaagaaatataagtatatcttaaattcatacatcaggaatcgtattattgcggagcgaagcggagcaataataaatcacgaggtcttaggtgtatgtcatgtgaccaagatacgtctgaatatcccatcatgtgaccaggtaaatgagctagtgctggctagctcgttctttatgcaccaatcaaaatgcatttattctatcattatggctttcaaaacatgcactagacgcggtcactcgcgtcctttggagctatttcgctcgcgcgctagcaatcgagagaccgatcagtatcaatcttgtcgagatgccaaaaagagagagcgttctaaacgccgtgcggctaccgagcaggcgttggcctattacatcgtccccggatccctacatggccttggaaatttgaatcagtcacttcgctccgcaatgactatctggaagcttaaggccaccgagatcccaggggcttatacattggttattgcgatggacccaaaaatctgccgtaagctggtcactgaatggtctcatttactcctctcactcccagactgccagttcactcctagttcattcccacttcactcccacttctgctcaccccaactcacctcctcagctgactctcaataagcgacactcgcattcaatctcaccacgatcaactatggagtcatctcataggaagggagagtgcaggcgtccaggggtccacaacggagaagagcccagattgttgctggaagcctgcaagtcgcccgcctggaagaggcctaaaatggccaacagtggtcctgaaagcagaatggtctgaaccattgactaaattgaaacaagatgttttattctgcctgaacgagtcaaaccaagaggccaaattctcattgactaagagtcgctcggaggggaggaagactatcaccattgaaaagtggacagctgacagggattctgtcaagcccatccaagccatatgtatcaccccaattcgaggtcccaattcgagcggccatcagatctcagggtcattgaaaattccatttctggactgttttcttcgcgcaaagaggaacgctgagatgcattttactctatcgcacgatacatgctggacattggagaagcattctaaccctacaacatcttccaggaagataaaagatcgtgctgaaattgtcaagatctgtaccagttggatcgataagcgggggataccatggatactgctgatcccaatggtggcgggggtcagacttcggtccatcagataccaacccaacaaaagcacagatggagaggttacgaaagctctcctaccaggtgtaggggcctcacccctgcctactgctactcacaatttcctcttaccattccttcttcgtctcctgtcccataataataatagtaaacgaggcgtagtccagggagatgaattgatctgcccgcttgcattcatctctaggaactgaaaagcacaataaaatgagcaagttactatacttcaaccccaaagtagcgaaattgtccagtcggtgtagagatagatatctccccgaactcggacaacacaccttcatgaatcctccacagaagccaaacatgcttcgagccatcctcgccacgttattcctcctcgtgccattttattacatatacaaacctccaagtctactcattcgttactgtcaacggcgctggccggatgtacttttccgcgtagacacagacaaaaaagtggttgcgttaacgattgacgatgcgccctccatacacacacctgcaatcctccgtctattggaatcgtacaatgcagctgcgactttcttcgtgataggatctcagatcccaggacacgaatctgtcttggctgacctcgtccgggctggcaacgaactcgccaaccatgccatgtatgatgagccatcgcgtgcactcagcgatgacgtcttggcagatcagatgcggacagtccatgctggaatccaggaagcctatgtcgcggctggaaagacagaacctgagaattggctctttcggcctggctcgggggttttcagctcccggatgcgaacgcttgtaaaggagctgggatatcggctggtgcttggcgatgtgtatccgcatgatccgcaggtgccattttggaaactgaacgcgagccatattttgagtatggttaagccaggcagtattattgtctgccacgatcgcagggagtggacggtgcctatgttacagaaggtgttgccggagctggaccgcagagggtaccgcgttgtcacagtctctgggttattgaaagagattggcgtaaattgatgttcaagttgatggcgaatgaatattgcgggctatcaatttacatatttcttctcgaaacgctatgggtatattcggacactattctcaacaggctagcccatcatctgcaattgatcctccgggggccagcggacttgcgcaaagctcaagcagcgcttgatactctgtagatatttgcgagtaatctcgtcactcagaatgtgtgcctgctggtcactttgatgcagcttctctcgtgcagatcgctcgtgaataccaaccatggtcacaccgataggccatgctctatacacatgttagtgccggttttaaatttaacagggtgtgggtcaacatacgctttaccgatgctcactcgtaggtaagcatcatttgcatcgacatatcgccgctgctgcgccttgtgaacgatttcaacgatcggctccaacagcccgtcctctagctcagccttctcgaagaggcgaaacaacggtgtcatattctcgcgtgattgggtcatggcattgaacgcttgttttccctggaagctttcccgcacagaaacatcacgcttcgctagtgccagttcccattctgacaaaaccatgttgaagtaagatcccaactgccggaaaaggaacagacggccctcttggtctttcgggatcttggccgggatgatcatctgtccaccaggcacaggctccagagtggtagggataggtccatcggtcaccttcttcttgggaatagcggcacgttgaaccagacgacgatatcgtcgaagacgggctcggtagtcctctccaaacaatattattggcgcattcaactctcgtaattttgcaataagctcctcctcctcgatatcttcctcttcgtcgccgtcggctggggtgttctcaggcagctcgggcagaccgagtctccgccgccgttcacgttctttggctgattcttcttgttctcttctcgtcttggactcctcggctagtcttcgcttcttctcctcgcgttctcggtttcgatccgcttcttcgtcttcgagcttgcgcttgttcgccatgcgctcttcacgttcgcgtgcaagtctctcttgctcttctttgtaggcttgaatgcgggcagcttcgacatcgcctcgtcgcatatatttctttgctggtactggggagctttttgcggtgtctttggcggatggtttggaggaatcactacccttagccttagagatctccttggacatcaacgcggcgaaatccatgttgggtgatgcagcgagctgctgaataattcgactgtagctcagttaaaagaatcgagacaataaagtagagttgcgtcaagagaagaagatggagtgtggaggcaggaaaagaatgttcggctttgcacgtcacccgcagctttcgacgccgcatttgtttcctccagtcaactcccctcaaccaaaatacaccgaacatttaccttcaaggacatttatccaagctttaatctacattcaactgatcggatatctcattatcttctgtttcttgccgtcctcgggactgccctaccatcatcatggctgctccgtcgcgagagggctcaaaaccctcaatcaaccgccagaccaccgcacctttccatttgaagctcttctaccgagtgaataactacaaccccctatccgactacagcatccccgcaccatctcgtcgcggaggaccagtcagcggcccaaactccatccgcccaacatcacccgtcgcatctccagcgccgctcccaccacacctggagatctacacatggcaatcatgcacactccgcgagctctcccagctcctcacttccgccctcccatcattactccccgacccgcctgtcggcacccgtctctgcttccgattgatctaccccgacgcgcgcggcgccgcaatgggcggccccgatgcgcgaggccgatacctgagccgggatttaggcagtgcgatcgttgggccgagggatagtccattgcgcgcagacgacgacgaagataagcaggatgcacgacctcgccctggcccgctccggttccagggctccgaggccgacaggcccctgcaggaggctcgtttcatcgttggggactacattgaatgcgcgattctcgcgccgcttgaggatgggtctgttgcgccggcgcttaatggtgcatctggtccgattatgggacctagagggggtggtggaggtggcatgcgcgcgttccgggataatggctttacgagagggcctggtcgtggtggtcctcgtgggggaggaggtggtggtggtggtggacctccgaatttgcctcgaggtgattggcatcgtggtgagcgattgcctgaaggtggacgtggaggccgtcgtggatgggcgccatattgagaagcgaaagaaagctggctcaaaggcagttttgtgaaaagggcgataaatacccatattatgtatgactatttagtttaagaccaatggaatcagtaccatctactacatgcactaccgttaacagaaacaagaaccatgtgcctcctggctaaagaggcgactagagctttatattgcagtatttcaacaaaataagtgtacttgattaaacttttgaagatttcagcctcttcaatcgtcgtgagtagctaagggtgacaggcattcatcctctagtcatatgacatccaggttagtgacgagtagacgcctatcagaagtccggacactgaacgagtgaaaaccgtctactacgtagaatattccgggtcgtacatctaacctcagaagtaaaccccagtttcacagccatgcaccaaatcaacaaaaaagaaatccatgcggtatatgcttgtaataaagtacacggccccacgacagacaccggcacaaaaagagttgaattcatcgggcaaacaaaacccccttccacactcggagtatccgcaacctctctcactcagtgtgtagttctccatatggcgccatgtcacattcgcagctcggtacggcttcgataacaaaacaggaattgaattatcgctagatgtctaccattcggcgatggaatctcctctgcgcttgccacggaactcgaacttgccctgcgatatcgttagcgcgtgtttctctctccgcaagatcagaccacaatgtgcaattgcaatccaattcaacaatgcgggattccatacatcggtcttgtaggcgaagtatcctaggatgccggggatcaggccggcgtagacgaatgagatccaggcctgacgcggggtccagcgccagtacttgtagcggttgatattgagttctgcgggtccgttagtcaatcttcaattgtagatatatcgtgtcgcggcatgctggttttgagagagatgctccagtagctcgggtatggttaagctagcgtgattcgcgaggctcgtccggggtcctggatcgtaggagatggggttgggggtatgtaccatagtatctctggagggccgggtcaaggatcacggctgggacaattattagcaaatcaggtcgcaggattcgtcaatttctgaaagctcacacttgttatggccagccattgttgcggatagcgttggagcgtagacacagaatcgtcaattgcaagcgtctctaggattgaagttgaaggtcacatgatgatgaatcagctgaatgatgtaatcagctttcgtcctcccagctcgtctatagttacgatgttgtgcatttcgagatgaaaagatgcatattattgtgtctctatacctaattgttcttcccaacctttttgaatgttctcattatcgatttctgtcgtgcagaggtgtggaggatatccgagatgatccgccaaccaaatgtcctccatatgcactgacacagcgtataaacaattaactagttaactatgtaagactcgagacattaatagtttccaaaacccattgcgccctttcataacccgaattacatggaagccgagaatttcccctcgatcgcctcgatcttcttcacagcacgctggtacccctcattgttctcgaggcgcttggcatactggattataagagggtatttatccttgttcttctgctccttcagcgctctcccggtgacagcaatgaccgggaaactcagcaggatatcagcagccgtcaactccttaccgcagatgtactcgccaccctcaggagacgtgcggagctggtcctcaaggaaagcgagattaccatcaatgttgcggttgaggaagtgattatccacttgggcggcaaccatgccggtgataggccgaatgaagaatggaggggcgttccgaatagctgttgaaaataaatgtcagctgcttcaaataatagttacaacatacacatcgggggccatgatccatcaacgccatgccatgcatgcatgcatgcatatgcgagaacgaacgaaaatgtacattgtacacgttgaccgctcttaaaaaaaagaaaagaaaagaaaagaacacttactgtcattcacaagactcatgaccaagaacggcatcaggctgccctccacgtagtgcatgaagtagcggtagcgcatccactcctcggtctctccacccacttggccctcgctgcccgttgtgtagcgttgtggtactagcgtcgggcgcgcgttaccaaagtggtcacagaggtattccatgatcgcccccgactccgccagcactagcggttttgcggcgcccggtgcttggatggtcactataggtgacttgcccagtgggtggacctctttcaactcggccggagcgagcttgtcggcgcggcgtttgaaggtcttgagttcatattccagtttcagttcttctaagagccagaggatgcggtggcttcgggattgctcgagcctggatttatgttagttagtatgattctgagcaatttgtgatggggcgtaccaatagagtgtgatcttgcagccttgattgttggccatgatttgttaatattatgaatattgtatagttgaaataaaaaatgtcgagtcatgaaaaaagaaaacaggactttcaagtttaagtgcccacacgtggatgatgtcaagatgggaccgaggcaggtttatctcccagaagggataaacggccgagactagctgatcttgtgttcatatttcgatcttgttgcaatattgattattatatcaatcggattcagatcttactgtgttgtgcagtgattattttatcatgtgaagatgtctgcttggtgcggcgactatccgtcgtcaattatgtatttgctgcgtggcttatcgacctgttcgtgttgatcttccccgcactatcaggcctcaccagctatacatagattatatagattattcagctctgcagctaagggagcattgatgtgagaaggacctggatcgaggctgagcatctcgtattttcatgacagatcacatgtgggtgttctccgcggttgaatatatattgatacccgactattctcgcctgtttacgagcctcatatcgatgatgaataatatgttgattcgtagattccaaatacaaacgcatgtttatgtctatatatactccggctttagagtctcaccggctccgcgtcaagcggaaccaacacatgtccctccgtaaccaaggagttcttgcacgagcgagctgcagccaagtccgatagattgccgagtgtaacctcagcgatctcctcgagggcctcacgcgtgaagaacccctggtgaccacagatcaagacattagggaatgtcatcagacgcatcaacacatcgtcgtcgatgatctccccagagtgatcattatagaacagctcgccttccgcttcgtacacatccaacgccaacccgcccagctgcctcgtcttcagcgcctggatgacagccgtggaatcgatgagtccaccgcgcgaggtattaaccagcaaagacccgggtctaatgcgcgccaacgtctcctcattgataagatgcttcgtctcctccgtgagcgggcagtgcagactaacgatatggctctcctgcagcagggtatcgagatccactagcgtcccatacggacggaactcttcaccggcaaacgggtcgtgcgcaagcagtcggcacccgaagccgtgaaagatgcgggcggctgcaagcccaatgcgccccacgccgacgatccccacggtcttgccatgcagggtattcccgagcagaccttcaatattgaaattgccctcgcgcacgcggttgtaggcgcggtgcgtcttgcgatttaaggtttggatcagggcgacggcgaactccgccacggcttcgggcgaataggccgggacattcgccacgaagaggccgagctcttcggcggttgcgaggtggacgtggttgaatcccgcgcagcggagcaggatcgcccgaatcccgtaggcgtagagagatcgcagcacgcgctcgtcgagggtgtcgttgacgaagacgcacactgcgtcgcagccttgggctaggggcacggtctcttcggacagcgcgaaggcatggtattggatggtgcacaggtcggggaagtgctgctcgcgcacctggtcgagataggtgcggtcgtaagatttggcgctaaagacggcgagcttcatgatggcgtatgtgttgtgatcttgccccgcggggtttggatgttggactaccattgccaagtcatgacgccatatcgtatgacacctgcaagcggccgttttggtcagtcgtaggttgtatatctaggttcttccccagattttccgattgcaacccgcatttgcagatctatattctgtattcaactggagatcgggatcgggatttgatctgaatactacctacccacgtggtagtgttcctgtatgcatcagccatggggcggaatagtcatgcactactctgtacagagtagttagttactgaaagcagttcacaacttctctaattgaagtatgtaataacacctcggcaagctaccaatgtcccacttcccgaggtcttctggacgattacttttttcagacatgcaggcaattcctaatttccattgcgcacgagttgattggacccgtcggtctcacgacttccgcggctccggtagccgctggcgggcaaggccaataggaagatggaggcgataacagccaatcagcagtcgatgataagaagagacgccccgggcattctggttggctgtgtcgttagcccgacgctagcgaacctaaggaatcccgacgttttcccttttcctgttttcttcatttcctaattttcagttttggatagatgagggcagtgaagctacatggtacatgaatgttagatattgaatctgtttaaagatcattccaagactgtagggagaacagagcacgagtagagaccaacacagtcttacacacaatataattatgcgaaccttggaacctcaggtagatcggaaatgaacccatcggacttaagtggagagaccgcaaaaggaaacccgtcactggggcttcatccagcggtctgaattcgattaatcacaaatagcggtcaaaaggagggcggatgtgtaggttgtagtgaggatgctgatttcaaggaagaacaaagtacaacatacatagttcgtgacaagaaggaatagagtcccagtacgcggaaaagacacacgggctacgagtacttgccgctacctggcccctgcgcgtgagtagtacccgccccgaagtaccgcaaagtacctagtatagagtgctaagtaccttcatgtatgtcgtacctcaagtaacagtatcattgtcctcgtgtacttcatggaggagcatatcgcagaggaggatgcttctcactcgacttcacctcctccctcacctcctttcgccctatttattggcctctcgtctgccactgtcactgttcacccgttccctctccatcttctccactgaacccactctgtgcgtaagaaatacggagtagcctcggccacttacagtcaaccttttcttcttgcctccccggctgaacggctctgtctattgtccttcgattaatcccaactcctttttgcccctcggtatctgcacttttcgccgctgcgctggagattaccctttaactctactttaaacattccgcctcccacctttcaattcgtcacctaacattcatcctcttcccatatctcaacttcaacttctacctcaactcaactcaactcaacctccacttacatcctttcattatggcgactcgtgttatgaccaccagcccggctaccaaccaaatctcggtctatggtcagccctcgccaaccaactccgtcaccaacactccctccaacaattctcccacctcccctcgcatgtccactgcgtctctgcaccaactgcctctgcagtcgcgccagctgcgtcctctcaagggtcccctctatgtccctgcagctctgcgacctaccgagcgaccccagaaatcgtctcctatcaccccacctcgcagcgtgcatggctctctcgacagtttaaacgaggactcagagccgatcactcgccgttccaccatggagagccagtccagcgaaattagcgagagcgcccagcacgagtggatgaagaatgagcacctgggtgaggtgaccggtcttccgacccgtacacactggaaagtgagtatctgagaaaaatatttccatctttccttccttgggcgtctttatagggattgggttcggtgtggattgcgcagttcttgagcaaatgtcgtgtgcgatcgtcattcctcggaaatggcgtgcttagtccaccgcctcatcccttgtcgcattccacatatatcctttgatcgcattggtcattggtcactttcttacaggtcaacttactaactttatccaggctgactctgcctcttccaactgtgattctcctacttgccgctcttcctttggcatcttcctgcgtcgccaccactgtcgtcactgcggtcacgtcttctgtgcttcccacacacctcacctcgttcctcttgaccaggatgcccgcttccaccccgatggtgtcccatcgcgcgcctgcgacctgtgctggagcgcccaccagcgctgggaagagaaccgctccgaccgtctgaacaagatccagcacaccatggatgctcagcagactggcatttccgtccccgattctatggacatgaatcgcgagcccaacgtggccgacgccgccgcctccgttcctcgtgactggaactggagcactttctaagcgcattgcctgtctcctttggtcttcggtcactgtgactagacctgcaactcggcgtttcacttgatctttttatcatcttttcactttatcgagtcgtgctcagcgtgacctgtttttcttattggcgaccatggctcggcgtttctcacaagccctggaccctgggctttgtttctgttttctgcagtcattttatgactatgcatcatgcctagaggttctcatcggtccttagcgacccgtttatgtttctgctttctttttttccgccttgcgttgatcagacactcatcggtctctagcggtccgattgatctttacttctgattctgttttttgcttcgcgttgatctggataccccgtcggttttttattgcggcgcgatctcatttgatgtttcttctttcctagaccctgatccgatgcctgagggaatgcgcttgcaatttcccagttgatatctagttcgatttagttcgatctagttgaatccaatccaatccattgatattgatattgaaccttgacctctctcaactcgtagacaatgtctaccctctatactttatcatcctgtagatctatttatccaaaaccaaccgccggaacatcccaacatgctcaatcccctcctccacccaccttcccatcgactcatccgtcacaaacccaagcccagcgtacatcccctcgacatcaacctgcgcatgcacaagcaccaatccccgccacggacccagatcggcacccgccccccttctccccctcgcaatccccgccacagcctcatcaatctcccccgcatgcccagccgcccaccccaacgcaacctccaccaaccgccgcccaagtcctagaccccgaaaccccggcacaaccgccacccgcgtcagcttaacacagggctcgtgcatccagtcatattccggccccgctgaagattcaggatccgtggtctgcgcgtgcgatacctgcggcgggggcactagtcggattgttcccaccggcgtgctcgtcgtgtcggtgtataggacccagtgccagctgcggggatcgtcgctgtcgatttctgtggatgcggtgcagtgttgctcgtctatgaggacggttttgcggatttccattgcgtcgttgaagactttggggtttgtggtgctgctgctggtgtcgaggacgagtttggcgtttgggcctgggggtggttgtattgatgtgctgaattttgggatttgtgccattgtgttggtatggatattgggtcttgactcttcaatggtaagtaatgatggtggagatttggggggtggaggagttagttaggtcgtagtagagggccgatcctgatatagatctaggcgagatcagccgacattgaacgctacctacgcttgattggaatataattgaatatgaagatactatactcttatcgtagtgaaactatcacatcttaagccaatataataagccatgacagccgtgtagttatctagtcccaagggctgtatacatccaatgcaaacagaacaaacaacatcaaatatcaaaccgatcgcaaaaatcctcaattccccgaccaacattccacaatccaaatgtccctctacttcgatgcagtcgcaatcctgaccgcgccctcctcaggcggctccttcaagtcgcgagtctacagcgcccgcaacctacgcgcctctccagcccagatctacgcactgatcaccgaggccgcaaaatgggacaccgtgctagcagatgtgatagacaaatccggtattctcgcactagagcgcaaggtgagctgaccccaagaaaaccaccagatatacctacctactgactgaccaagtgatttccctctagctcactcccctcctcgctctcctcctcgtccatgaccacctcctcgcgaagaagggcattgccgcgccggcaacgcacacactccgccagacggtggagcgccacaaggctaggctgaaggccgagttcacgaaagcgcgcgtgcgtcgtggatgcgcttccgtcgagcaattcaaggctgttgtcgtgcgcgagaaacggctcgctgatgggacgagccatttcgtctacccgcgctgggtgcgcgttaataatattcgcacgacgcttgaagagcagctggatactacgttcaaggcttaccgtcgtgtagagagtcttgcggaattggcgccggaagacgagatggaaagtaggaagccggagccgaggttgtttgttgatcctaatattccggacttggtggctgtgccgttcggtgcggattttactgcttcgtcggcttacaagaatggggagattattcttcaggacaaggcttcttgcttcccggcgtatttattgttaggtgaccgcgggcctggggacccgtgggagggtgacttggttgatggatgtgctgcgccggggaacaagactacgcatttggcgtcgcttctggcgaagcagcaaaaggggaataagaacagcagacagataatcttttctatggatgcatctatcacccgttctaggacgctgcagaaaatggttggcttggctggggctgactcggtcactgtgctgcagggtcaggatttcctcgccctggacccagaagatgaacagtttgagaaagttactgggttgctgttggatcccagttgttctggtagcggcatcatcgggcgtgacgaggtccctcagttcacactccctgctgcagcaccatacaaggcgcccaagtcacatggaaagaaaaggaagcgtgcggacaacgaggaagaagcagatggccagtcgaaagttaccattggaacgccgcaggtagcgcccaccgatgaaaatgatatcccagatggcacggtcgacccagagcgactaaccaaactatcaagcatccaagcgcggatcgtcgaacacgctttgcgtttcccgaatgctacccatgtgacgtacagtacttgttctattcacctgattgagaacgagggcgttgtggctcgcattctgaattcccaggttgccaaagagcgcggctggcgtctcctgcgacgtgatgagcagcccgagggcttgcgtcggtggaagaaacgaggcgtgcgagaggagcggccggcggagggagagacggggccatcgggctcggtagatctctccgacgaggcactcgaagcgtgcatccgatcctggcaaggcgacgcagaaggtcttggaggatttttcgtcgctggattcattcgggaccctgctcatgtcacggccgttccagcgaaggaaagtagacatgatgagagtgaaggtgaaaaagatgaaaaggacgaagacgacgaagaatggggaggattctccgattagacaaaagtaaataaatgcaagtttgcccagcctgaaacattcccaaggcatcttttaccatacatccaagtcctcggcgtattatgcagtttaagacttgaacagatgtacagacgactaaaggaatttccgtgaccggtttcggacctgcgagctggtatagatgtccaacttgacagcaaccaagacaacctcgtatatcccggtaggcccggtctgcacttgcaagcgccattgtccagtccgaacaacccagggcttatcgtccgtattatcgacccgtggacgtttggctggaggcacactatcagcgccagcgccagcttcagccttagctctcgatatcatcaaatgatgagggtcttgttctccatccacggtgagatcagtttcactgtcgacacggaccttgagtggaacttggcccaatggcggatgtgaatcgggcaggtttaatttcttgccaaccgtctgtagcaaactgacaattctttgtttcgaaaggcctaggaagtcaacacgcatggtcccacgatgaatcagactagactcgtcgccgatctcaaccaccagatcggcggcgttgtcgtctataaacggacgcgcgtatgtgaccattcgacccgacccagaaaccgtattcaagatacactgaaccccagacggccgtacatcctcgaaccggatgacgatttccaaacgatggctgaagggattcgtcgttatctgatgcggtatcaacttttgttctaggccgcgcagatggaaataacgacagtcgcgcaggagcgcagcccgatgatcttcgtttctaatatgtagcggatacccgcgcagcagatgcaggagctcgtcgaagacatccgcggatcgattcggcacgcttgggggaacaatggccgggggtcgcaatagaccctgacggtccaggcccgggaacacttcagacggggaagcgaagaaggcggcgaatccgagggtgaagaaattcggggtatcgcctggacctgaaaatatatcgcgggggatctggaagtgtcggtcaccgatttgaataaagcattcggactcgaacagctgggacatcaatcggggcactgttggtcagcatacttctagggtacgggtacctggacagaaaatgctcacatgtgtagaattgcgcatctgcgaatagcttcacgaactgcgcgccatcttgcggccggacatggtagcctggatgcacccatcagcctctgtcacgttgtgtttgtccatggaccctaccctgcagatgtctagcgatctcgtggaatgtcgtgggatcgcgatcgatataaagggtcctggtgttggctacatctggattctgaagcaattgaagctcgaagaagcgtgaaaagtaggatggagctgttggaagggtcagtgtgagttaagacagttagacgggagaacaagcgcgtttaccatcagaggcaattgaagcacccgacagacgaaaggtctcggaaccaatttggatagagaatactttctctctcggcagactacatttagagcgagtgggagtgggcttgtccatcttttgatgcgaaggtcgaggtcggagcggagaaattacattttgcctgacgactaccggctacctacgacataggtacactacacacacactacgcatacacttcacacatactacacactacaattataccactgagccaacttgaagttacctgaaattgaaactagtttaattggacctgaattttctatccacgctggctccagtctcagctcaccttgagtctcacatggcgctgaaactcggcaattctccccacagacgtgccagtcagcccctggcttccgagaaagaggggcggatctgcctctccaggaaacttaggccgtgaaacggtcaggtaaaatggagacttgcacggtcttgactggtcgagatactcaattactccaccgccacaagagtcaaaagcttcactacggagtccttctccactcgaccgaggctgctatctttgggtcgcgaggctggctgaccgtcgcctaaagttactggaagagcagtccatacagagtactttgtctatgactatccacgctaaagatgaaccaggttggactctgcatacgtacctgttgtcatagtgggaccttgtcgagctagtactaggtattataaacatctgtaccgtgctcaggtgcttctgtctccttgctcccaaatctctttcttattctcatcctaccattcatcctatactactggggcttgatctacgacagctttgtctgctctagtccttgcaacatgccaaccctcgctgtttccacatacaccccgagggatgtccctcttccgccagcgccgtcggccacttacttctcggagttgcagtggaaaaccttctatgcgctggccgacgcagttgtgccctctatccacactgcagcaactaccaagtcatcgaacgaccgggtgatttcaaatgcagagtggaattccgccgtgtcgagcttgtcaacggctatctctggacctgacgccgtaaaccttgccacccagtacctgcaagaaaatgtctcttcgaacccgcaattccgggccgcagtggagcgactcctgggcgactatgtgaatgacgagggaagaaatgggtttggtttcatcatgtcagcgctcaacacccgtgctggttctctggtcatgacgggctccaccactccgatccaggaccaaccgattgaattccgagaaaagatcttgcgcggatgggacacctctcgattggctcctctccgcgccatctaccgaggactcacggccattgttaagaagtgttgggttatcagcagtccaaccataagcccggttctggggttcccaagcatccctattcatggcgagcaggtcgacggtttccagtttgagtttttgcagttcccttctggggatcagccagaaacgattgaaaccgacgtcgttatcgtgggaagtggctgcggcggtagcgtggctgcaaagaacctcgccgaagcgggctatcgagtgctggtggtggaaaagtcctattcatacccgaccaacacgttccccatgggcgcgaatgagggatataccaacatgttcgagaacgggggcgctgtctccagtgacgatggctcgatggcggtcctagcgggctcaacgtggggtggtggtggtaccgtgaattggtcggccgctttacagacccaggggtatgtccgacagcaatgggcggatactggtctccctttcttcacctccctcgacttccagaaaagcttggaccgcgtctgtgatcgcatgggtgttaacgacgatcatgttgagcataactaccagaataaggtggttattgaaggcgcaaggaaactgggatatgccgtgaaaacagttccccagaatacaggtcacggcgaacactactgtgggtattgcacgttaggatgcgcgtcgggtgggaagaaaggcccaacggagtcgttccttgtggatgctgctcaggccggcgcaaaattcatcgaaggattccgtgccgacaaagtgctattcaccaccgtcaaaggcaaaaaggttgcttctggcgtacaaggaacttggaagtcacgggattcatacttgggcctcgctggtattggggctgtggaacgtcggctgattatcaaggctaagaaagtagttgtatcagctggcacattgcaaagtcctcttctgctgttgcgtagtggtttgaagaatcctcagattggccgaaaccttcatcttcaccctggtaagaactttctttcacagcacattttacaggcacttattttcttctacagtgcttgcggctagtgctgtctttgatgaggatactcacccctgggaaggctctgcgttgacaacggttgtcaccgagtttgaggaccttgatggaaatggacatggtgcgaagattgagactgccgcaatgttgccttccgtggtcattcctatcttcccctggcgagactcattggagtataagatgtgggcggccaagatgcgtcacagcacgagcttcatcgtcttaaccaaagaacgcgatactggtcgtgtctacccagatccggtcgatggacgctgccggattgattacacggtatctgcctttgaccggaaacacatggtggagaccctgattggcatcgccaagattgcgtatatctcaggagccaaagagttccatactgtttaccgcgaccttccccccttcatccggccagagacttcagaccccgaggcccctgaaggcattaacaatacggctctgcagagttggattgccgagcttcgtgcgaagtcccctttgaacccggagcgtggtttgtttgccagtgcacaccagatgggtacctgccgcatgagcaagtcacctaaattaggtgtggtggacccgaattgtcaagtctggggcactgacgggttgtatgtcgtggatgcgtccgtgttccctagcgccagcggtgtgaatccgatggtcactaatatgggtatcgccgattgggccagccgaaacctcgcgcgggcgatgggaacggtaccaggcgagggcaacgtgatggctcgtctgtgatgtcatggtagattgaccgctactagttctagattatatgatatgcctagcatgattttgtattaaaatctatctcttcctcaggtttagttagtttcgttataagactcgttataagattgaggtgcttgatgaagccgaatatcatgtctaattctttccctgatcgggcgctaatgctatttctcatttatcatgttgaatctaagccttgggatcctgacgcttctcaataaattgcttctcaccaaaggcctccttgacgccctcggtctcgagagtgcgctcataccaagcgaccacggaggggtactttgcgcgcatttcagcatcgatagccatggagaaaccccagaccagggcagcggcaacggtgatatcagccaagctgagcttttccttgctcgcgaaccaagtgcggcccttgaggtgagtctcgagacattccaacgagcgttccagacgcgcgaggttggtctcctcgactttctcatcgaagggccggataccgagacgcggcagcgccaactgcgtcacagggtccaaaatctcaccctgcgcaaagcagatccactggcggatagtagcgcgctcggcggaggtagcgccagtaagctgagcggcagcggggccgctctcggcaatgtattgggtgatggcgtctgactcgaatagggttgttccgtcggcaccctcgaaggcgggcactttacccaaagggaacttggacaggaaatccggggtccggttggtcttgcccatggcgaattccggaaccgccacttctaggccgttcagcttggccgcggccagggcctagcaggggttgttagcgcgtgattgcatgctgacagggggtcgagattggtaccttcatgacccggggactgggctgataagagtagatagtgccgaatggtgccatttcgatcgtgatgaggtgagatacaggtacattgtagaattgaggggtatgttttatatgaagctaaagagcggggcggaatcaggtggaaccggatttctaagctggtgagctgatttgaagcacaaaacaggaattgcgcggtttgacatatatctttgtcgttttatataaactcaggagatccatgtgaaattactagcaactggttatcaattcagtatgaaggagcttaactcgcgccaaatccgactcaagtggcccaccttcgtgagcacagtcagaacttaatgtcgacaagtctccctcggctgttacggcgagggtcacctgcacaactggcccgtatggctcgacgtactcgctgagtaagcgccaggggtattcacacaccgcggacatgggattagaaccttagcgattagtctactcaattgcatgagccatcttgggaacctccactctagttcgaaacctccatttcaggatacgctagtagctagtcctaacatcagctttttgtctcttcggaccgaaacagttaaatatacaagaaattagggtcaaaatcaaaatacaaggaatcgcagcacatcccagatctactaggtcacgccttgcatgcctcaccgaggcgcatatagttccaacaaactgcaagttgggtcagcttttcacttcacaatttcggggtaataaagacgcactcgtatgtcccatgtccttgccaaacaagctcttcatcagatcttcgccatcgcgtgtgccctcgctcgggatataactgacggccgttttgccgagagcgaggcccattacagacgggaacggctccaaggtctgatactctggctttccaccggtgcactctgccagcatatgctggtggatattcatcgccgcgtaatggcccatatgcattgcaccaccacagcgcttaatgccttcccactcagtgaggtctcctactgcccaatgatgctctgcgttagggacggcaccggagaattgtagtctgcagaggtattagaaatgtttgtgcgcaacttggtggaggaatagtcttacgagcggtgcactttgatgtatccctcctcattcaacacctctttcggcagatatgtcgatgttggaacgcttcgggagacggcgtttagaacatggcccgttctgagcttttggccatcgctgagtgtgagatcccaggtccgtgtcccatttttaccgtccacagcggtcgtttcgataacgcgttgtcctaggataacctcgacgcctgtatcgcgcaatatagtacctacgcgctcggcaaattcatcgggcaacggctccgaagataacaagcgctttcgagagtggatcagagtgatcttctggtctgggttaaggattttcaattcggcagccatctccacgcccacggcgcctatccagaaagacatgttagcgggtggaagtatcaaagagggagggagcacacgtacctccaccaacaataaccacaccctcacgggcttccttcacatccgtcatatgttgtctagcctctttgaggaactcatctcgccacagggactggggaacagtggggaaagaccgacgcagcccggagcctgcaatcaagtagtcatagggctccgtgcggttactgttggtctccgcatcgacaatattggcaactttagcattgaaatccaccgagctgacgcttccctggatgaatttgagttctgggcacttgagcccgggaatatcttggaaacgagtccatgcctcgggcgcgaacttttcacaggctagggcctttggggatccgatcaggtgaactacatatgtgagcgggggtgtaattgcgggggaattgtcgatccttggggagcttacagtagccatctcgcttatcgactacagttatctgtatcggaatacgatgtgtaggagctttggcatcgggattacagttgaaacgcgggagacgaccttgcgagagatcaatgagggttaatgcagcagatagaccgccataagagccaccgatcacaagcactcggaagttgcgtgatacagttcggacaaagtcattggatggcatggtgagctgagaaggagaggtgtgacgagcaataaccgaagaaagaggccgagaggaaagcggaaaaggagaaggaaagtaaaggagagaaaccgagaaaaaaagccaaggaactgagctatgtactcgaacaaaaataaagaaaatagttatatcgtcatatcgtcggattatgcgagtccggatcttatcagattgaaagcgacatcggatacagcgcatccatggttgttccttggctttctcttggctcggattatcagatccgagggcagccgtggaaggtgaaacatccctcggttgtattgaattcctccgacagcacagaccctagtaagccaagttttttttggcaggaccgacatggtggctgatacacgcaaaagcatatattaagtttccttccgtcaattgatcttcgtgtgtaatattaggatagaagagagctctatcacggcataattacatgcacaacgttgaatattgtatgaaccagaagtttgtttacggttggacccggtggctgtaatgcttgtaaagtaaaatacacttagttccgtggttcgatacagccacgcaacccaaaagagcagtgatcgtcgatcagacaagatgagcatctaatctgattctggaagtgctcgacccgacgtaacaaacgaagaaaatgcgtaacaaaatagcgcatttgctgcaagatccgcttttcgtcattctttatgtacttggcgttacaagcgttgagctcgggcgaatcacaatagaatctgataacatacgcccctcatttaattacattttttgtttcaaacagattttcggagttgcaattttattgtgcacgaggttcgtttgtcaatgggatcggggtattactgcaaaaaatctagtctctatactgggtgaacacgagggctgtacaatctgtgctccttcctttttttttttaattcgtcttctgacgctgggccagcaccgccatcgccatatcccgtagctccaccttgcgaactttgccgctccccgtcacaggaaccgtgctggaagccccctcttctccaaatacaaacacatgctgcggggctttgtgtcgacccaaagtttcacgtgtccatgcgcgcagttcgtcatcggtcggacgaccggcgcccgaagcgattgcgataaatgctccgacgacttcgccatatttgggatcagcaatgccaaccacagaggccaattcaattgagggatgcgcggccaatcgttcttcgatctcgaggggatatatgttttcgccgcctattcgataattagaaatcgcgatcaatgtctacggtggggtgcaagcttaccgcgaatgatgatgtccttgaagcgaccagtaattgtgcagtacccttcggcattgaaggaagcttcgtcgccagtcttgagccatttgacaccctccgcatcggttataaatgtctctgccgtcttctccgggttgtgccagtatcctttggtaagctggtagccggccatgcaaagctcaccacgctgaccaacgggaacgatgtttccctgggcatcgataatcttggcgcgagcgtggggcaaaacctttccgacggtggttaatcttgtgtggatgctgtcggtggtgaaagcattgaagcaggtaggcgaggcctcggtgagacctagacttggttagcacttgatcatcaagccaatgagagggatggtaccatagctactagtgtattcagtcatattcaattccgcgaagagccgcttcatgagtggccgcgggactggggccccagcaatgatgcctgtgcggaggtttgagctgtcaaagttggggggcttgggaacggcaaggatcgcctcaaacatggtggggacaccatgcagagcagtgcatttctcgtcggagatggcatgcagaaccgccttagggtcgaaggtttcgctggggaagacaattttggcgccatgggtgaccaccgcgagcatgcccaggaccagcccgaagcagtggaacaagggcggggggcagcacagaacatcaaaagaggtgaagtccatgcgatcaccgatgaaacgcgagttattaaccaagttactgcgcggggattagctatatttaacaacgaatcgtcgtacgtggtccacatactgatgagttaacatggcagctttaggactgcccgtcgaaccgcttgtgaattgcagattgcagacatcgtccggccgcaattcggcctcgcggtcctgaagcacatgtgcagcctgcgacagaccacgttccatgacatcgtgataggtggtgaaattgttgtaactttcgcggagaataacgatttcctccaatgattccgaggtcgcagactttttaggattagggcccagtttgagaaggacttcctcgagattatgacggccaatgcgtggtgtcatgaaaagcattcggcattctgaataaaagcagaacaaacagccgagattagtatggagtcaataatacggaagtggatatcacccaccactgtgattcaaagcgtaatacagctcggagggggtgtatgtgttgttcaaaacgaccaagatagccccaactcgtgcggccgcaaagaacaccgagatgtactgctcacaattgcccgccataattccgatgcggtcacctttttgaataccggaagccaacattccccgagcgagacgatcggtctcgtctttcagctggccgtacgtccatcgggcaccggtccaggggaagaccaagcactcaattcgcccatactgcagtgcttgcagcgtcagcagctcacccaaggtaatgtccagcagcgctggctccgtcgggcctgcgaccagagacagctgcggagtagtcggaggctgcacatgcgacagcgtctgctgcaagcgctgtacacttctcggggccgccatgataggtagattgaaaggtaaggaaaaaggaaatcaggaaaaaaaacctaggacatagcgggtttatagatgtagccgacaataccgcgacaaatttcgcacaagataaatttgattaattcgattaattccattccatcagatagcccgggctccacatcggagctgttgtattggtaatttcacgggtttggcttttatgcttggttgactcgacgccttggcgtctgacaagactccactcggtcttcaagcgaaccttggaaccttggcaggatacgcaagctccgagggtccttgtaggtcgatgtatacatcgaagatggtccctgcatataacgaaagtacttactgcgtatgtgtttgcattctatagggcatctgcaaggtactgggaatgtttcccatgtacataatccgatattgatcgatcgaaaaggctgcaaactctagcctacccttgtgaggagctagttcatgacatgaattttgctgcttacggtggactgacaccggaaatttgactgtctgcaaaatataagatatttgaatcttttcgtaagacatctacatcggtacaagtagaatcctctcctcggtcatctccccggggatcgtctggtaaatttcctgtcacggtagtatggcccaggcttggatgtcaggatctaaccggcattgaataacagaaaaaaaactccctcgtggcactggaccccactcaggatcagataaattgtctgcagaattccatcccgggttatcaatcagtgtgaagatgtccaagtggagcccgttgtcgacgagcccgggacacacgtgtgagttggtgggaatacataattggaggcactgactcttggcacatcctggcattctgaaactagttttcgcttttcgtctgttggaacttgtaagacaaggaacaggcagtgggtcacagcctagaccatctttgtcggatattgtaggcttagaagacccggtatataatatataattcaccagcttcatcaaaatctacctcgccatatataacaacacagctaccatttaccattgtacgagttatgcaactctggtctatacctagggcttgggaatctaatcaatcgggctgatctaatcaatcattcccgacatcggcgccttcgtgtgggacccacctaaaaataccataaataccgctcgaaagattcaatgaatgttacagagaattagtagggaattggcaggcaaaaatagtactccgtagtctatactaggtacgaagtactgtatgtactccgtaccaggtacatatatgcattgggtataaaaaagctaattattgcgtaatatgcacggagtatgtcaaggggctttgtcgtatgtcaagatccaatccactagggctgaatgccggcgtcctagttgggcttctatatttgttctagacttgatgttaatataattgatggagtgcttagaggccttcttaatttacattggactaaccctcactactagttacgtcatggttgctttattaattattgtaacttcatttctcgttgggctgtctgtctagctgttgagagtggactactctatcattgcttgtcaaccgaacaacaaagattccccatacgatcagattaaatcagattgatagaaagcaggtgcaaaaagcctatcattggcatactctgaatgcaaatagcaaacacaagacatggatacatctcaggtagacggcaaattagtacataggattctacacgccgaacttatggccctttggtacagaaagattttgacaacctttccagtcgcaggtgttctgctaatagttagtataagtaattgaacgtcagagggggtaaacacaccttgtaaacctctgttccccaccatttgaaatggttgctggctccagtaaagaaaattgtcaagaaaatcaagacaccagcaattcccactgacgagtccatggcagaactcagcacaaagttatacttactccaccagctatgcagacgcttccgaatgagccagccaaaggtgagtccgacaactgcccagcttccgtaattcattccggtcgcagggggcaagtaattgagcccaccgaggaacaggggaatatgaacccttctccatagtgacttggggtatcggcgggtcatataatagacgggaatgggtagaatggcaccgacgatgaagaaataaagcaaagcggaatagccaatttggtttgagaagtaacgacgaggacccactgcaccccagatcaaggaagtattgaagtgggttctgctgtaaggacaagtgaaaccgttaacagcagcgctagtgcagacgccggtgatgtgattcagggcccaattgaggacaccgagcgaggagagcgtgccgataaccattcccacgcattgaaccaagaacagttttcgttgcgggatcttccgggtattagcatgattcaactatagtaggaaggaaagggcttgcatggcaatagtaagcgagtttcatatcctgggcaaagtaaagacccttgatggttgtgatgtatccgatgtcaaagaaccagatattggccaggactttgccctcaaagacgaaaccggccacgatacggcagaagatgtcgatattgatcttgaggttagaagtggcatagaccagggccaactaagattggtcagagaggtgtccaatgtgtaaatcggaacttcaggtagactcaccgcaggataaaatatcagtgccacagtacacgccagcagaacaccgtaccatctcagttcaacgttccaccactcaacggcgaacatcgacatgaataaggctaagacgcatgcaaccaggtaccaccacaaaggcacatctgggtctccccgctcgtcctcgctgtactctctagagcgaccgggaaaagactccaggactagccgaggcacccttttggcagcatcggccatgacatgacgcttttcaaggacaacccaaacaagaagagcgctcagggtcgcaaatgagagcccaaacatgttcaacgcgtaggtcactggcatatagacctaaacgttccacaagttagcagaatgtcaagttttttgagtttatagaacgtgtaaacataccggggaataagcaaggtacttcttaacatcgagcttgtagcctgaggctgcattgacaatctttttgactttataaatattcccggtattgtcgaatactgtttgcacaagttagatttggtcgggagcttgaaaggatgggttgtaccttgagagctttggaaaggcaggtagcctgtgttccacacattggaatagtatagagcaacagccacaatccaaatccagaacaccagggaaacgaagacgttgaaaactgcccacgatgggatgagcaagggtgatccgacgtaagatatttggctccctattggggtcagcacggtaattgacctgaaaggttgtgatactcacaatcaaatgtaagcggcaacagccccattccagaattcattccgaagatctgattgactactttgctctcaggcttgatccaacacgggaagctgaaatagctaagcgccgggaagatgaagtctgggaaccaataccagcagaacgagatggaaaatgccataccgaagaaggcatagcgggacattttccaagtattgtaactaccatctatcagttccattcaccgagacaacaaataaatacagggaacttacgtcacttgcactttttgctggttgacatgatgcagcgttgtggtcaacgcagtaacacccagcaccccaggccagatcagctcttggggaacgaccacaatcgcccggaatagaccagcaagacagaacccgatgaggaatgtggagaaagtaatgagaatttggaatccccatcctgctttgtaaccgtagaacatttgctgctctgtcaggacatcggcgccaagacgaacgtagatactgaggttggacataataaagatcaagacatgttcctagaataacctttgttaaactgattactgtgacgttgccagggaacatacctttgtattaaaaggacccgggttgagctcaaatgccagtcgtcctagaggaacggtccagttcgggacgattttctcccaaagctttcccaggggataagccaacaagaggacaaccgagccggaaattgtcaaggaaggtgcacggagcgtgtagagtgtgttcaacccgctaacgatgacacaaaaggcaattcctatcacccacatacgtagagtgaggacgggctcagtaggatcatctttagctatacctataccagcagcccgcaagatttcggtctgtgaatctatgtctgcagtggtgtgagaatctcgcaaaaaaagaaggaaaaaaaccccaagccacagcaacaggcagcagcagacttaccggaatcggtattattttcatcctgaacttcttccttttcccgaatgtttctctccagcaggttaatatctgtgtccttgttggcttccatgatgggcatgaaggaaaatgagatagaaagaaggatcagataaaaggatcagataaatagacaacatcagataagatgcagaaagaacgtgtaatccggatgcaacctcggactcgatccgtagaaatacacgaagtccgtattcccacggttctcagccctatagggctggctctcaggggagacaagcttcattctctgtctggtccagcgtgttattggacaggttccagttcaagcggggctgtaatactaagccagagtatgttgttgcctagttaggaaatacccacactcaacgacacctggtttagctttagtcagtgtctagatcttacaggtcagatcattttggttattttccgattagggcatgattttctcgcctctaacagaaactttgggctttccttactttgtagactaccaacaagtagttagtttgtaggagtactgcatatagtagttaattgagccactagtatacaacatatttccaaactctcccagtgatggaccattatagaaccaccgagaaagaacaaaaagcttccactgtgggaaccttaagtgtccactcaaactctttacaagccttctcgtgtcattttacaggcatggttttatcggccgaggcacgttcccttggcccataaaaccaaggtttacggtctccacggtaagcatttggatcctttctcagtggacaagttcgggttaggagtgataggacccctcttgtggacaaagtcaaacaagacactaatacggagtactaaaatagcagcctccaggcgtggctcttctgggaaccgtacggatgtactcgtaaagaatggatgtatgacgctcaagccatagaggtgtcatagggccgccatatagactcgcataattcgataaatgcagcgatgcaaatcaacatcatcccggtatgtagaatataatgggccaactccacggcctatgtttctccagtcaccagtaaatcctcttctaccactgagacacgcactttgatgccccagccatctcgcccaccaatccaattcttccgctttccgaccttctggattttctgcacgtcattttcgagctcttctctcaggtgagacgggtcatcagccactttctggatggcaattgtcaagtccaggccttctttcttgcccttcttccccatgcccttcttccatcgggccgagggaacaatgcgaggcttagaggtgtcgacacgcccggttgggtacagctgggctaggacgaggccgagttttccaaggtaacgtgtccaccaaacttcctccggtgtcaagattccttgtagctgggtcttcaaatccatgtctctgggtggcagttctccgccataacgttcctggagcatcagtgccaggagggcacggtggtcatgtggaataccatgcgtggaggctaggatcccagtgctagtgctgtacagtgcggcacttgaggaaagttctttggccattgtggcatgataatagagggaattagcaaaggcctggataaggtgaagactgatggaaggcgggaatgatcggctggcagatggtcgaggaagggccgccaacaataaagcggccagtgcctgggccgacgaaggcgcgtgacgggccgtggcgacctccaaggggtcctgccgacggacaaccgggagcatctcacggaataacactccttcccgaactccaccttggcaaaaatgggcctctttgattccatacggtaatgactgcgccagggtattgactaagaatgccaccgaggggacttgcctgcgtcgccggtccgagacccggaagatttcatgtgctgtccgagccacctctttgagagctttggtgttctcaaagtctttcttgggtgcggaatacccattaataatcgagatggggtaactttggccttttgtctggtgcaggtataacagaagatagccccatccccgaaatcctcccccggacaggtagagaggaaagcccccttgctttcgggccttgtgaacaagctgctcagggacgtcgagggtatcaaaagcggcgcggaagttgtttgccatttcctcgcggaactcctctcgagctttgtgcgcatcctctttactttttccgcgtgcgaggtcggccagtttctgggtcaatgcagctgctccatagggaaagctgactgatccttgggagctcatatgcacgttgcccgcatgcgatatgatccaagtcatctgcatgctgccaccccccaaatcaagtgcgagtccctccacgtctgagaagctgctggcaattccccatgctccgattactccctcctgctcctttcgtaatgcttccaccgcaatcccggttttgtggaggatggcgtccatgaactcagaagcattgaaagcagttcgagttgcttccgtggcgataatccgaatgttctgagcaggaactccaatctccacgcaaacaatctggaaacggactattgcactaacgattcggtcgatgacattttgtggaatggggattcgattgcctgaatcgggatccagttgggcctcgtagagcgaaacattgacccgatgaaaatgtacagtagggatgacacgggtcgtaggaggggagagatctgagatggaacaacggatgccattactgtagtatttgaagtcagtgaacagtcctcacacgcacattcaaagggaacgaagaggggatttgatctgcctacctgcccaaatctaccaccgcatgaaggtacgcattctgccctggatccgcgggcggcttttggccattcaatactggaatttggcttcctcctcccatttaggcaattggttgaagttgctcaggtgtactttgtgcgttgaatctcgaaattcagctgcagaggacctctggggaaaaactgcgtgacatcatcattttcgaccgcccgctgttctgccggacaattgtagatgtgctgtagctcccaagtacattttgtttgtttaaaaagaatcttaatgttaaatatttgtaagacataaagaattccaactcttaacgagtctgtggtcatttaagttcattgtggtcggatacattgagtacatcgtagatacgcgttattctcggcaactggcaaggcatcaacccttgccttaggcttaggtaaggttatagatcacatgactagatttcacatatttgtcaataaaagcttccattaactgactggaatcttgcatggaaccttgtctgtaaatacctgagtaggtagttcaactacaaaagctttagcggagaaaattccgctggtgttgcaaattctgactctgtatgtatgtagccctagaggtacccatgtacccctcatatatatcacaagcattaatcataagatctattccgtacaaatccatacaatgaccacaagccgcaagtagagtaaatatgtattcaagtaaccgaaagcaaatcagataccaatagagtagtaaatatctacctggctcgttcacttcaatttcgaccctgaaatgggctgatccaatcatgatgtcacgtggcgttgtctaatcaatcagatcagataaggcgtctgttttaactagggggattccgagtccacaactcaaccccattccttttttttcctttcgagttctcttgagaaactccgtgtcagaatccgagccaattcttattcagacctcttccgaagtttggtcctacctacgagatccaacggtccaacgactcagagacttcgccgatccacatgggtccacctgattagtgcgattatcggcttactgccggtgctccgcctttcgtcttgagccgttccttcactcaccctcagaccggccgactatctgaggactcattatgttgctctgttggctggtaatcgcactcgcccaaggtggctgggctaatccagaggatgagcggtgtgtgacggcggtctacacggcatacaactacatatcatttgctggcattctctcacaaggcaagcacagctgggaatcgcaatgccggaatccgctcaaggtcgcatcgatatacgccgcatccgatatatattgcaatgagcaggaacggacgataggcatggcgcagctggctaaccagtgccaagaatatgggaacctagagctgctgtcgagggaagcggtcgccgaaaacctgacagacgatgctataaggaatatgagaattgtcgactatcaagagctgtcccgaggcgaaccagtgaatgcgcctgtccttctttctgcgtcttacttcaacctaatgttcaaaacgattgtgagaccttctggaccttgaatatgctagtcctaaagcttattgatgtcctaggaatcttgggaacttgtgacttggtcacatcatgcatttgggtaagtctgctcaagctggcaagcaagacatatattgattaatcagttatattggctacgcctattggggtggtatactatctttggggatggcctatcgcttgagtgattggctattccatcgccgacaacgccgtgtagagcgtgtactcgaatccaatgtatatcccctcatgaggtccttggacgatatgccgttggtgggcaccggtcttcactggatccagactcatctgatgatcccaccgcctttggcagcatcacatggtcgatacctgctaggcttcacattctccaccagagtcgaggcgcttatagtcgtgggattctggacgctcagcatcgtattgagtgtcgtgggctatcacacctttcccggaaatatttagtaggtaccagcctgtggaagcgagatgtgcaatgttgacaggtagtctagctggcccgatgtcacaagccaggttcttcgttattctgcagaccgcactgggatcatgtcatttgcgaatttgccccttctatggctctttgccggacgaaataatatttttctttgggccaccgggtggagctttgcatcgttcaatatattccatcgccatgtggcccgggtggctactatacaggcagtagtgcactctgtcctttacattgtcatgttccatcaaagtaagtattgctcgtttggctttcaatgcgcgctaggatacttacagtcattccgacagcgggcaaagctgcgaggggtatgtcgaagacctatgttttgtggggtattttggtaggccccccaatttaattgatcccaagttggtcgatctctaattcatgttgtattagggcacattcgtgatgattctgctgttgatcacctcattggatcggatccgaattgcgacatatgagctcttcttgattgctcatgtcgtactttcgattctcacccttgtcgcgtgcttttagtaagtacatccccgcgatgaaatttctgcatctatttctaacaattggcagccataccattatatttgaaggaaacgaatactggaagtacctgtggcccacggtagctttatgggtcgttgatcgattccttcgaattgtgaggttgtgttactgtaaccttcacgtgagtctctcaaacagacttgtgaaagtttctgagagccatatggtttacgacgaaacggccgacgtggtgcgattggaggtcatactaggaacgccttcactgcagccttcaccagggcagtactacttcctataccagccatttaggcttaccggctgggagagccatccttttaccgttggagcatggtcttacgaaataggggaccagacatcattggcgccaaaaaacgagggaaaatcaactagatcgcttgatgtttcgcatgtgccgcttcttgcaggcggtccctccgatcaagattatccagaaagctcagaaaacatgtcgaagcaggagaaattgtcgaagttgaacttgactttctgggtccgcccgtatgacggttggaccagacacttgcgccagcaatgtctgagctcaccagccaagactagcaaaacgaccattcttcttgaaggcccatacggagaaacctttcccctgtggaggtatgaatcagtcttgattatcgtcggtgggacaggaatagcgtcggctgtgccttatattcaagatcatctccgccggtctgttgaagactgggacgaaagccccgaaatggagaagacacgagtgcgagacatggagcttgtttggaccaccaaacaagcggcgttcataagagatgtctctcgccgggaactgaaacgtgccctcaaacgagaggacttcagcgcctctttttatgctacgcgtgattccaccgcatcctctgaagatcctaccgattttggattcgatatccagtcaggtcgaccccaccttcaatccctgatcatgagcagggcctgcgatgcatcctcggctggaagtagccttgcgatcctcgtatgtggcccacccagaatggcggatgaagcgcgcgccgcgacacatcttgcgatgcgacagggccaccgctcgatcaaatttgtggaggagtcttttacgtggtagcaaaggggctacatgagaacttttgtgatgagtatacgacaccatgcatatatactgatgaactgtgtagaggttttcgaggctagaacttgaccttttctttgttagatagacatagatagaatatcttgcccgtacgttgtatgtggcgagttccgggcttcacggttttcgcgttttccgcagtgggaattttcagactagaaagggtcactgaattcgacatacggagtactccgtaccgacgtgggaatggagatggggttgttgtggctgacagcggggcgtgatgcacgacgcaggagcctcctacgccacgcatacgactatcgatttcaagtcgagaatcaccaattctaaattgacctgttcaactgttaagcacagaaacatgagaaatggggcatcaatgcgataattcacgaaagaagagagaagatcgatgtggtgagaagtgatagatcggatttatcaactatccactacggaggaaccgagacgtcacacgcaacagaacaaatagcgctaccccatggccgaagatcacaacgagtaaccctgaattttgggttctcgtgactttcatatgcacctatgcatctcttcccgtcggagaaacataccggcagggtccgtcgatcgacaggggaaaacttgaacacggttatggatcgcttgaaagtcaataactcatgttggccaagcctttttccgctcaataattcacgggggcatccactccgctgcagcttcgatgctcggagaccatcgggtctttcttcccccatcagcttgaatgagaagatgagagaacggatgaagaactaggaaagttataaaaggaaagacctttccagtgatagttctttttatccatcattcaactctctcatcgtcaaaacctttcaagccctccaaatctacctaccttcttcaatcactttccacattctccaaaaaccgtcaaaatgaagttcttcgtccctgccttcctttttgctgctaccgccatggccctgcctggctcgggccatactgcttcccattccgacaacgaggtcgagaacgcagtgaatcagtgtggtaacggtgcccagatgtcttgctgcaacaccttccaccagaacaagaatatcacccagcataacgttggtgtcctctccaatgtcctcggtgccgttggcggcgagggtctcggcctaggccagggctgctctcagtttaacatccccgtctctggtaagtgatatatctatgccagtgaactaaagcatgagactgaccctattgtagtccttggtgccgctggcctgaccgacttcctcaagaagaactgccagcagaacgttgcctgctgccagaactccagctcccaggctgtatgtactcccccaagacgaagaagcggaacagagtcactaatcccaatagaacaacaacctcatcggtatcgccgccccttgtgtcagcttcggcagccttctgtaaattgcattccatcgagtgcatgcagccttttccgccctggacatatcaacgagaaccatcaaacttgttaattgtgacggtctctgcgggaagggctagtggatactagtacggagtatatatgtacacttgcaacgcctatcaggggcctgttttatccgatcttgtcaggccagctttctcaaatttgtgggaccgctgttcgtgagcgtggatcctgccattcatttctctttcgtttgtcaccagtctcggggcttttaattatatatatttattttttattgagaatagaatgtttttaatttgatatatttcgggtatagtgtcttccttctgaatggatcttgaaggggggactcgatttcgaaagcgcaacacatttcatgacagctattctactgtatctctaaccggatagcatcgtattgcacataaacagtggcaggtagaacggcagtctctatatccgttgcattgaaaggtaaatgcaatcgcagcacattgtcaccgacatgtaaccaatccgccgggaactccaatttcgatccgacctggtagcagctgacagcagaccgcacaatacagctgcttgattgattgaacccaacgacaagagtcagaggatctgcctgattgttgatatagctttccagtgacagattgttgtatgactcgaggggattccacacatccgtgttaccggctgcggtctttgcggccgctaattgcaaagttaatgtggctgttttgcgcttgttcaattgcttcgagtcaagcttgaaatgtatgttccagtcgtacgtcgtgtcatactcgacgtgggaatcctttgccgttggcccgaagaccgaccaatgggcagagttgagatcagtcgcagggtcgctagttccaatggtgtaattaacaccatcagggaaatcagagcgccagtcataggctccccaatatataagatactcggggggatgaagcggatgggttggatctctcgcatttccacgtcggaactcccctgacgacttgtcgggaatcccaattcgccagagctcagttcctgccgactcttgggtccaagtatcatgcagtgcagtctgccttcctgcatgaatgatgattccgtcgcgtacaaagtcgccgaaaatgccctctgcgtaaatagtgagtcggtatttcccttctttaacacgatcaatgctgaagcttccatcttgattgatatcagtccagtactgataggagcttggaacggcgctattatcttggaagtattggccgtcgacagtgagaatggcaattgggcgaacggctcccttgggaagcttcacggttcctctgacactgcctcgctggctagagggagcatacccgatgacatgctttgcaatagaatcatagaactcagcgttccaatgaggatctgctaattcttctgcctcggatctcagttcctcgagagatgccgagcccttgccgccattgaaaaggtaaaattggggaccgaaagttcgatcgaatccgtttgtgatgtttggcgtgccctctccatgatgatttgatacgatatagttgtacactataccgtccactgttaagtcggaatggagtggtccctaatagatgtcagccgctgcattccaccgtgctcgatatcgcttaccccataatatgtatcctagaataaatttgttagatgggattcgacctggtgagtattggagtaatatgaccaaccttggtattcatgactagccaagctccatatgttaccccatttgaggtgctgccgtcagcatatagaccatgaacagtattgtttctccattctaagaaaacaccatcatttagtcaatcagtaaccgtagaagataggggatcgaccatacgatttgagaatgtatatttagtaaaatattcagaaaattgggtgtagtacgcgtcgcttggcgtgttgttaaatgtccaggttgcatcttgaacaacaatctccttggaaatcgcgtccttgcctggcaggggtgcggtctggacctcgctagacgtcagatgcgtccaaagatcggtatttggacgaaacaaggtccggaactcctgcaagttgcgaagaaagggcgtggtctcattatggtaggccaatcggctgaacatatgcaaaccagtctcgccatcgcgcaggaaccagtactgttggaattgctgtcccgtcggagtatatgtgtcactcagaatcatgcctccgtatttggttccagttgaatctgtgccctgcactacctccgtgctcggggatgtggcaccggctgtgtagaagcccgaagggatacagtaacagtcgagatagggccctattccagtggatcccgactgagtgcccaacaagtcctggccatccaaagttagatcgactatctggccgacactcttctggaggacagccgtgaggcgagcattggcgagagtgatgtgagtctggttttctgcgatgtgtagcgccgtggcagcagtagcccctgccgtgaaggccgtcaataaggaagcccacatgtggggcatcggggtcgttggttttcttttgacagagtcatcgtcatgaattgtctttataaatgactctaatatgccgggaaatcaatagcccgaatcaaggattgcttgcggttccagttcggttccattcctctttgaacacggattttgagatccacgaatgaattgggaatccatgaatcataccaggaactcacggcttagtctagagagaacgcactccacatcaaccccaccgggggagagattatggggaactctggggatgcggggctttgacggagaaattgctcggtcattgctcacccgagttcgtcgctaaaggggatattttcatttctgagatgtacggtggtcgtattttcgatgaaatcgtatagttatctcatgaacatttcattgtacaggttagacatgttcatgtaaaattgacccatcctagccaagagtcggacatgtgttgcatattcccatcaagccaaccgagaaataagtcaggatcgtcgatatccacactgtcaagcaagctagcatcatcaatcaacttgtcactagtttcagtgtcttctacggcagaggagagaccttcgacggagagaacttggtccaagacatgacggattgccttttggccctgctgtgcgacacggtacatatagttagaatcattgggttgaatgatggtgtccagatatgccgcgaaaagagtcaaattttgaatgacttctgaacgaggaaactccggagaagagcttgttacaggcgatcgggatcgacggagtaattctgcacagagaacaccagcagaaggaagacccggtaagcatacctagtgagatttcagcgttccggctttctgccacaatcaaagctaaggtcaacttacattcagtccgatatctttgatgggttgtctagagcgagtcttctgggaaatcataataaccaatgttttcagtatctctcgagcgatgccaagaacttcctcgggttgcgtctgggtgcgtttgccgagggtccggtagagcaggaaatcgttgtagagaaactctatgtgaacctcgaaaaggagatcatattctactttggaaatgagtgccccgtcaatattaggtttccaatgaagaaattcgggtagtccctgtcgtaattggcgagattcgcgtgaaagctccctgagaatgtcagcaatgccctggctgtgaaattaaactgtcagcgtactcgaccctttggctgagattgtcgagttgccgactcagtgaaagttccaagaccttctcacggaaaacgctagtgatcaaggaaattcgaggccacgttcccttcatcaagcttgactccaaattccatccagtctcctcatccagtcgagcaatagccgcattacgaacagcggaatcggcaaatacttcctcaacgctcaagtcaagtggcatttgaatatcacagtagcgccagctgatgagcggcgggcggcctagaaaagtggcaagtcctttgtccataaaatacgccgcgaccatggttctttttcgcatctcagaaagaaagaatggagcatttttgctagaatcctgatgcagcccgagcgcaaacagcgttgtcgataactctcctaattttctccacggtcgaaagtctaaatcccgttagacaatgcgagcaggcaaaagaatgggataacgaaccactttcaccatagactattgccaaaagcgtgacctgatgcaatagaagccaggccacaatgtcattcacaattccagtgctatcacagaactgaagacatatgtctcccacagcagtcgcagttacagcgagactcttcggatccatcatattcggacgcatgaagacgcggtcactatgagggacccagtctgtggctagacctgttagagtaaagagcagcccaatcaactcccatctcccggccgcagcagactggaaattttcccatgtcattgaagggtacacatcaagcgcccggctatgcgtttcaaacagtttcttggacaaaaagaaagctcgctggttggtgttcataccctcggtttctggagagttccacatattctcaacgagagtaaaaaccatgttcgtgactggccaaccgagactccatccactccatatcttgaatcgagcggagacgacatccctataaaacggaagattctctagaagcgctaagacccgggcaccgagattgatccgcttttggtcaactggaaagttctcatggcctgtgaggtatggaattctgtcatgaaatccgtttctcgtatccgtgaacgcatcgcagtaactagtttgccctagaaatccaggggccgagactgacgcttttttccgagtccagaaatcggtctcattgggcagtcgattgatattactaggagtatctgattcgcacacaacgcggcgttttttagaagggcgtgttccagtgagtggctgcgttaatggtgctgggtgataggtacagtggagaccgcggcgctcacagcgtccacagatgggacttgtatgatcgcatcgcaactttgaggtacgacacggctcgcatgatgataattgaccattacggcggggagtcgccattataagacacctggttgattagaggattggcagtaaaaaaagagactgggaagtagtcgagcgtgttagctatacaacatagtatgtacttgtcggggctcggccctcggagctcggagttagatgactaatgatcgggtcctatccgggggccggtcgggggccgtacattccgtactccgtatggcggctcgttattatccgtctatgtgggatacctcagcctaagtcgggataatgagttatgtactctacagtacggaataaattcaaatggtattggataaagtatccggtgttcaaccatatattccaccatggtgttcaaggtgttcgacactactttacccacgagatttaccaatgcaaccatgtatgtcatgtgaatagtgtaatatagggggaaaagccaaattcggaatcggtgaaagagcgttagatcatcggcaatgaaccggcggaagaggcggatcttaattattaggcgacaaaagctaaaaataatgacaaccttggaaaggcgacgatggtggccggatcctggtgtcgaatcatgtgcccattcacattgaacgtaaatgaaagcgtcaaatagctgagatatcagtcggccgtcggcaaataagatcatcgcatattcccggggtggagctcggagaccccatgggacagcgccacccccgcacaacgggggagtgcacggactaggccccgtgttctgagagacaggagttttcctgagaggcaggcccttgcctttgacatcctgctccctccaactcggctcggtatatctcacttgtcgcccgcgatcatcgcaaataatcgccctattactgcaactaattccttgaccccccaccctacctgtccatccatggcgaagagacgtcaaaatcactcctgcgaacaatgcaggaaagcaaagaaagcctgtgatggctatattttaaatagcggcaaagccgtattcattgaagctgagagtacgttcaagcccctcgacaaccccctcttccccacacatccatcccttcggtgctcccacaaatatgaacagctagctaaaatgaatccaccgcaaagattctggcatgccctctccatgctcgtactgcattaggacaagcaaaacctgcagtctgaaccctcactggggccaagatgatcggcaaacagaagagggcttgtcgcgctcagaaaatatcggactagatgatgaacaacgccgggacaaaaggcagcgaattcagccaccagagaatgagatcgaggcgtcagtaacacccatttgtacggttccttgccaaacttcacccacagaacctttacatgcgcctctgccagaaaataacgtggttgattgggacgcgctgtctgcgcctgttgcccctcatcccattagtcagtcagccctcgcgggggctcttgcgggatacgataattgttcacacccaggggacccggggcaagtgagctccatagctgtacccgacaacaagcacgcagaccaggtcgaatataatggtttggatagcctcatggattcagcactggccaattccaccacccacgattctcactactcggactttaattcacaaaccttcatccctgatacaccccaaacgcttttctacaaccccaatcccgctttctccatatcttcagtgttggaggagagaggccaaaacgaattgtggagggggcacaaaaaacggaaagatatctgcgactcgcaagactattttgccatgacactgtctctatttggtgcgggccatctcgctatggaaaattcgaaccgagttctcatatccgagagccttctgcggatttatcatgatgttctagagaacaacctcgggtgctggttggcagaagatacatgcccatacaagatgcggcagaggcggcacgagccactttccatcaaccagagcccgagttcaggacaaataccgtccgaatggggcgtatcatggacaaaccgcatgtactgtcgtattaaacagctcgatcgatccgcccggtcggcaaagctgattcatctctctgcatcggaaaatcgagcggcttccaaagccctcgagctgtctatcatggcatttgccacgcagtgggcccagggaggacggcgatgggatggtcattggctggtaaataggtgcgaggatgaaggaatgcgcgacgaatttgggcagacactgcatcgatctgtttgggaatgtgcaaaccaggcgctccaagatgtcacccacgtggagtgttttagggtggtcttcgctgagttggttttcggtcttatacagaagccgtcgtcaaactatttcgatgcacgcgcaaaggataggcataacaccgatcagaacaaaaacttgaagccttcaacgctggcacaggtcatgagcatcattgatcagggggaaccgccggtattcattgagcgaggggctcgcaaaatccacgtgctcaaataccgattcaaagcgcgccaggcaggctttcacaatctcggcactaaactagacgagcaagtcccggtagagttcagtacggaagagacccagacggtcggcctcttgtactggctcgcaatcatgtttgacacggtctcctcatccatgaatgagcggccagtcgtcgttcccgatgacgaatgccaacacgaagctgcacaggagacagtacgaaatcccactcaacccccgacctctagccgccggtgggaactcgacctctacgcccaggaggatcccgagaaggcactagccatgcgttggccttgcccgtacgagttcgtgatcagggccctccccagatcagcagctgtgaaagtgctgctcttccgctgcatctcataccttcagaacgccttgaaaaatgccgaatgcaacaaagtcgtggaagacattatccaacgcacgatatgcgtgtaccgctactggatgaagacgcacggggctttattccgcgacctgaccagacactacgactcagtccctccgcggatcaagagctggttcccgtgtattagcatcccctggcatctgggctccctcatgctggccgacctgatcgagttcgtggatatgaacagtctcggctgcgatgactacatggcagagcgtgaagatgtctgtctggtaaccaaaatccggaaagaaagctcaatcgacatggcagaccttgcagctgtcctgacccctggacctttggggggaataggtctaaaccaactgccgggctttcacttcgccgtcaatgagagcccgcttttgactgagccctggatggtgcttctcgttcgggcgttttccaaagcttcaatattccacctgaaggaaatagaaaagctgcagaagtaccagcgtttcgtctttgatcatgagagcaaggccctgcagacgagtgtcgcacgcctcgagaactgtgttacggctctccgattcctgggtatcaagtcagcgatggccgaggctatttctatagtactatctgaatcgctgagtaaatgccgaactctgggctgattttttgacaagccaatatccccttttttgaatctcgtcatatgtgccgtttgctatgggcttacatgtttggtgttttgaattttgatatccatttcgtgcatcacgtttatttcaaggctatgttagagttcaagcttatctccattgaacaagtacaacctgacagatatgacctttttttcggctgaaaagaccttacttgatactaagtgagtgcgattgtttttgtgcgccaataattgctctatccatcctgtaatagttagccagtctacgcttctttctgccaggactcagcaagacatcatcatcaataaatcctcaagtcaacatgcagattcctccctccttcgacaaatggcggcatatatatggcatcctgctggacccccagtaaccttcggtatacaaatgccgcgtggatatcgcatcagccgatcatcgcacctacctataaggtgccagtcaaagaaaaccggtatccaacctgagcggtcacgtcgacctgaaggattctcaccctaattattaccctgtctattgtccactcgctcttcaatttacaattcagggatattaccaaccctacaaaatcagacatttgacctttcgcagagtgcgagtgattggtctgatttaattccgaagcaaacacaaaaaaaaaaaaaaaccatacaacagtgaggattcgctggtagtcacccacccaactactaactcaccggcgtgttgcttatagttatgcggtcaatagttcggtgggtgccgcccgggtgataaggtacgctatagacagggtgagaagccaggtgagaaatcacctaagtcgcgcgactaatgcattgaccccttcagctgaacagaatttcattggaccgtgtcgttccccttgatggcatcttggcatctacacatacctacaactagaagcattatacaccccaggcactaagcaggttgaccgtgcaatttgttgggatcatagcacatgaccttgtttgtcaggactgtcacatgccaactactaaatagtctcctctctcttctcttcttcttttccccttctcatcatcattaacggtgatcatcagcagttagcacgaatacatctttgcattgctgatctctattctcctgactcgctgtcacaattccaattggttggtctgcttataaagctttcttgaaatcggccgggcgtgcgccgcctccgtcgtccggtatggattgtggcttcctttgttctttggccggaagaaaggatcggatattagaccatcccaattcccttttacccggccactgcgggctttgtcccctagttacttcgtagcctaagggtacgatgggaagaccacgacttttgtgatatctcatcccgtgatttcttgctgtctgaaaattattggctcttggtggctcatcggtggttgtgttccccacgattgattggttactagcatgtccgtacatattggagtatagggaggatcgaaatcagttttaccacctacatacggagaatctttcttgaaccctccttctaaacatgctaatatcaatcttgtgacctctatctttatttatatatatatatacatttcgtttctaattttgggtttttctttctttctggatttcagcttgacctatttcatgtagatactgtatagttttaacttcaactttaatatgaattttcaaagtcactgagagactactatatccttttcagagttgatacgacttacctcgatcagattacattgatagttctttcagttatatcgataggcgataattacttctttcaagacagaaaccaattaaactgaatgcatttttttagatccagtcaagaatctagtgaccaactagaaggtattggattataactcttcaatcaagtaagactaattgaataagcataccatagagtcattgtccagtctaacagactataacgttctagagtccgttacaaccacatataccggacaattcgcgttacttacattctcgcaataataataaacgaaacctttaaccaggtcagccaataagcagtacagcataagaaatagcacaatatacccactatatatcctagtccttccgtaactcctttatcgagctacctaatcctctttctctatgccataataacacttcaaacggcttcatcttcctctctatacgaaagagcataaaagcattatcctagtgactgaaaagcctatcccttgagtcaaataggtctaaagaactatctaggctcacagtatatctccaacagccttctctcttcagaacactattcaacttctatatttattctattcctcaaagaactatccgttacctcttacttactcaatgactcaggcagaaagacagtaagaaaaggattcaatagctacctgatcgttcttaactggctcaaggtacaatatctattcaacttaagaaattggccgtgcagaaaatgtggcttaagtacggctgttttccacaccctatggtcgtaagtgcttgaaatagcatcaaaaggatttatatagacatcattacctgtagaatgtagatgtggtgggtgagagtcgggtgagagtcgggaatcctgcgggccggcgtgcgtctacgaggcgggcttggcgttttgctgttaaatttcaaacgcaaaggcgctttgatcggacttgatgtgagccagggagctttacgaatagtaggtcttggcagataaacaacaaggcagatggctgccttcgacctaatccaatatccattacgacaattgagctggtcgtaagttgtaacgaatgggaaaggaaatgatgaaataacggaatttataagcaagcggagcgggccgcccggtcagcccggtcaccccataacataagtaaatgcaacaaaccgaatcaaatttccactatggagtactatagcttagtttcaattataaatttgatgtagttcaatataggattctacagcattaccttaaaatccatgagtgtctgctaagatcaattgacggtcgttgtttacccctaaacaggacggcggtgaggatcttgggccctgtaagcacatacctgcctttaattaactacggagtcattatccctacaacatatgaggtttacggatcggcgatggtgtaatcggggctagactcagagcaaacaccagtggccacatcgattcccgcatgcagtagggcgccccgccctccacgccctttgacatttgttatataaaattatactccgtacaaaatacttaaagagatgccacagtcttgataacctgtaattgccagacttccgtggtctctttactggagcgtttagcagccaacaccaatatctcagcccgagtgaatgggtcgcccgaactcggcggaggaatatggtcgtgatgcccctccagacagcccaattacccttgatgagaaggaagatcctaagagatggccgaaaagcagaaaatgtgagagacctcttcgattttgaatctctaccaaagtaataatatatgggttaactgacgattatggctatatgattagggctctatacggtgattgtggcgctgatggctggagtaattgccttttgttcgagtatctatacagcaggaaccaaccttattactgtcacctatggatgttcgcagacagtggctactctaggagtgaccacctttctactagggtttgcatcggggcctctcatctttgctcccctgtcggaattatagtcagtctatgttgagatactcctgccttcagccgcttataccagtattaatctagcggtcgcaaccccatattccggctgacgctgggattgtttgtcctcttccaaattggttgcgcattagccccaaacatagccgcgctgataatctttcgattcttagccggctttttcggttctccgacggtcacaaactcgggcgcgtctatcacagacctctggccgcaaagcgaacgatcagtacctttagctctgttctccgccggtagcttccttgggcctgtttttgccccggtagctggcgggttcgtctcggaatacctttcctggagatggaacttctggttggtgcttattctaagcggagctgtctacgccacatgcgtgctcttccttccagagacgtacgcagccaagcttttgcgggataaggcccggcgcctgggagtcgtccagtccgggccctccctccaagagcagctccggacctgccttatccgtccctggctgatgcttttcgcggagccgatcttattcctcctctctctctacatggccttcatttacggcattctctacctcgacttcacggcgtatccgattgtatataaacagtcccgcggctggtctcctggtattgcaggcctatcctttctcggaatgggtacaggcatggccattgccacgattgcctctccctatgtaaatacgattcacggaaaatacgtatccaaacttggtcccgtcccagaagccagactaccccaccttgtgatcttgtcttggctgatccctgtcagcctgttctggttcggctggaccgccctgcctccggcgcattggattgtagcaatcatttcgggggttccgtttgggttcagcctgatattacttttccttggcatcacatcttacctcacggactgctatggtccgtatggcgcgagtgcgcttgcggcaaatgcagtcttccgctcagtctttggagcggtatttcctctctttggaacgtatctgtacgacggacttggcgtgccgtggggatcgagcctgctaggtttctttgcactagcatttgctcccctcccgtgggtgttttatcattttgggccccggattcgaatgaagagcaagtatcatagaatgatgattggtgatggggcatagggtttcaatccacttctttctgatttcctctctgattatattgcaaattcatattagccaacagcggggtttctgaatgtacaggggaagaagaagaagaagaagtctataaacatacttctttatgtatgaagatattagaaatttttacaatttacttttgacactttcaaatatttattttgcaagagatattgatgagaattcactacagtggagatcccaaatggagaatcaatgttcactgtaactagatctcgatcgtttgtaggaatcaaaccttctacatatctctctcaccgcttcaagatatattccatctgatagaattaggtagcaatctttaaaattaccaaccactacttttcttaaagagattgaaaatctacaatgtcactattacatactatgattaattataaaactcaatttcttaaaatttcttaatattaataaaaaaatagatgataaaagtagtattcaaacctaaacagtgctaaataacagtaatttattaagatgacttagcagttttatacgtctaaattgagaaaggtcaacttttttaatgcaaatgagggccctcagagtgcccgctctcaaaatgtttttaatgaggtctacgtctccgtggcctacctaaggtcacctgaccatccaacatattgacggccacactccatcgtcacttccattcatcatcaattctattgattttctttcgttctcagagttcttaactcttcccctctcacacgaaaatggataaacaaacccagaccaggcgttgcgatgaagttaagcgactctacaagctacttaagagttgtgaatcttggtttctttcccccggtgatctccaaggcctcggaatctatagccagcaagttggcatgacaggtgacggctctgtacaatttggtccatgtttctttcggccttatccggaaaaggtgcttcaaaaatatccactcgatacggtttcgatggctgcggaccatcctccacagactcttcaacggcttaataacccccgggacttctagactctgttccgagaagtccagaatgaccctaaggtcgaaaatcccctggaattcgctaaatcaagatgggatacattaatacttttatataggccggatacctaggaagatcatactagacagatacattggtatattcaatcctagtagatacttcctcggagagggctttcccgggactctactctcagcgatctaagatctatctacgaacggaggttagtgcactttgctttttctcttttactctactgtttttagggactcaatatactaggacgaaatggaagcatagcgctcctgaactatgtggacttaatagaaggaactattggcgtataccaagtctccgagaagattttcagccaagctttaacccacatgcaattatagaacttttatccgatattcccgcaaatcatgcagagaattgccttactctctaagaagtaagcgctgttgtaaccgtgatggttgctcgaacatccgatcggccgttccgggaccacccgatccatccagttagtatcttacatacacttcctagctactagagatttcctaagcactcacttatttttttatagttattggttctttcatacactggacagaatcatggaagaataattcaagcttcattacatggagaaagcttgcttttgcaatattctcagctatggagttttgcggatgacgaaacggcaccagttgaactcttcattcgttatgatatgagccagccagttccgatagcctgaagagccgaatcctattattggctctcttgtcggccctgttacgtctatgagcttgaattagctatttaatacagaccctaccacaaagtattttacccacccgcatttttaccccaccatcacaaaatatatgtgaaggaacgaagccaaattgattcaatactgactaagtcgacatgctgtttacaaaaaaagcttggagaagggaaggaatgaagcaagcgagacaataataaggatgacgggcaaggcggtggcagaacggaagcgtgcggagactagaaagtgccttttgaaatttgacgcccatcgcccaccattatgcaaaattaatgcaaaaattaccctattaggctattttatgtacataaccagatcttggcagtaccaattttgccaagagtgtccgcatatgtcttggcgacgctaaaagtgtctccactttaacgggcgttgtcacagtctaaccactgcaacaagtcagttctcatgaactgactttgttatgaccttttggtctaatgggtaaacgttggagcagtggccgacggatctcataagtgcacctaaaatcaatagctagctttaactacgaaacaccggcttgataggtatagataatagataagcgttgcttatataaaagctcaccttttactctacgtaaagagctattttctgtgcctaagagagatataggggtggtgtaggaagaagaaaaaaagtgagtggtggttagcgtgatttcaaagtggggccaatcttaagtctctccctctaccttcttcgctgccttcttctgttcttcttctgttcttcttccttaacagcatcagcccatctataaccgttgttctcgaggtacccggtggagaatacatatttaacacccatcgaagacggaagggaggcgtcaacgtggccgctagcgaccctcctatctccgaggcagcatcatcaccatgattagacgtaggggacactattatgagattagcatattgcaattatgatctagactttgagttctgatttcatgtattcagactggttcaatgaagatcgaagacctttcagtgacaacgcaaaccgagtctgagtttaggtctacgctacatcgcccctgccattagtcgatgagcaaagcttaaatagaagcttgccttgaccaaagctaggtattatgtacgcatttttgttgccaagttatattcaatcaatctactggggaagagtgatttgtatgaacatcaagcaagaggactcactgttgggatcttcttcgacgacagtctttgttggctattgggttggtgtcagtgtccttgtcatcgtcgttcttggtagattgccctttagtagtattagtacaatctttgacgactgaagaacctagattaagagaactcacctgtgggccttttatgtcatcacttcttgcgaactcgtttcagcccctttttcgcactggtttgctttttacgatcatgcttccgcttgatcctggcagtttgctacatgaataagggtgtgtcagtaattacctgatcacttgctatgagacacgagtagcgtgcggcagcggcacggtatatctttttatatctataagtagcactaccaattttagggctatacgaacttgaagatatatgtttgaaaccttaagatcttttgcttaggatccacatttaatattttacgtagtactccttatctttaagtacagccctataacgtctcgttatactcaaaaccaacctgtctatcttcgacaatagcaatagcatccaacaacccgggcctacgcatttatatagtagcaacagaacaatgtttgtggcagtctcattcaatgaagtttcgattaaactatcgtctattggtcctaaagttgcaggataatttctgtatagatcaatacgacctcatctggtgcctcaataagacctgtttctctacctaggtaggtaggtacctagccctggaggtttgtgctgctttgtcagctcaaaacaacctttggtttcgttaatggaaaggcaagatttctcatctttctcccacaaacactcatcggaaaaagcagatttcaagtaaccatggaaccccctccaacaccccgccctccagcaccgaaggtgccctcgaccgtcagtcaatggagagccagcgcgcgcgattgccacgtcctgaccaaaaatccaagcaagctcgagtgtctgcacccaggttcaaagctcacgttcaaggaatatctcagcatgaggattattcggagggtctccaatatcaccgagttccccgaccgagaaactgaaggtagagccaaggagatggtcaagggggactaagcaatacagacgtggctctcatatatcgaaacggaccagtacccaaccgaccgaaagcttggcatgttcgccctagtgagaccaggtcagcttgcgatagtagcttcggattcccaggaaccttcccagacagttgaacttcggcgtcgagatcgacctcaagctcctgaactatcagcagataccgcgggacgcagtcctagtgctgccgcttcaactgcgccaactgaaccgtctactgccgcttcaagtgtgccaacggaactgtctactgcagcctcgaggaagtgggtcaagtacgccagagcggatggagaaccgcaggtgaaccaattcgtgataacgctttgacactcagcgtaggccagagcgtgaactgccaatggtcccctaatggtaatctgttcggtagcgtgtcttttggagaagtccaattaaccgcatatgtcgacggataccttatgggagtcaagaaaagcgatatttttgctattgtggaggtaaaggcaggaatccgggaccccgagcaatatccgttggtcgagtggcaagaaggcgcagaaatggtcagctggatcatgaatgatgaggagaatctgcgacatcatccattcgaaacgtgggtggagtgtgaatattcgcatattttcgtgctaagtgctgtaggcgcctcttgatctctttgaatcgacatgagatgtatttgacactcgcccgctaccacgaggactacgtaaagttcctaaagggagaatttcaagggttgaagagctaccccgagaatagattcctccacttgcacgagtacggcccatgggatatcggcaagaaatctcacatgagggacctggccgaaatcatcgtaggtttctctctccgtgtcaaagatgaacaggctagatcggctgtgccatcagggagtggtcctgacggggcgtgagcacaatgtgagcgatagacatgtctctagcgtgtccggtgcagtatcattccattacaacggtttctcgaaatcttttctctctctttcttcctttcttcccctatacctgttgtctcacatagaggcactctaaatctttgatcaaaagtgggtttccacatcgggccaataccacctgtccttttgtctcctttcatcaccattcttacctccacagctctcactgatacacgtcaagactcgccccgaaccgaaccggcttgctggccctacgccctcgaccccacctgccgctccgctcgcctggctgagagagatccgatctacaatagatccgagccctacgatcatggtaaaaaccatcacatcttagtcgcctataacgctaactactaggaacttaatcttaacccgctctatctgatctcggtaaccctataggtaggctgcgccaaaacccacgaaacccaaaacccaagccaatctatgggcgcctattagacctattaaatcgtaaaaacgtgacgttcagatgatgattttatttcatatatacattgaacttcttttcaatgataggcccagtcactatcatcctatcttgttcgcttacgagctctcactgacgtgcgtaagccggtgcttctaggatcggattccggaagtggggcatcagcctcagcattagaaatcccagtttgttcgtgactccgggcccaaagttgggctttacggaagcctaggccggcccgtaggcgggcactgtcgtagtctacctacccattgagacccattgaaattagacctagataaagcctataggcgacggttctgaccgcgctcagaaattgtagtgcttacagaaaggtataagctatataatttcacacctcatcattttcttagaggccatacgagtgaataacttccctgaggacaggggctatcaacaaaaaaggctgatcaatgttaggtggattcttagttgttgaggttagtatcacagaatagatggctaacaaatgatgcacatgtcacgttgttaaattgttccatctctgcctttattttcaggccgtagagtgagcaagtctttgcgctcattaagcgctgtcgcatacccttgagtacactgagtaatcaccctgtgctgtgaaatactcagtgaacaggaccctgagccccctcataaggcggcggcaccccgatcgggaaattcgcatccgcggcctaaaatccggtacatacagctacatatgtaggtgtcccgcagatccataaaccccggtgagtagattcgatcagtcttagatatgattctgttgggccatgatgcgtgcgacacctgggcagtcgggtccgctttggttagggtttgggttcgacccccccccccccccccccccccccccccccccccccccnnnnnnnnnnnnnnnnnnnnnnnnnnnnnnnnnnnnnnnnnnnnnnnnnnnnnnnnnnnnnnnnnnnnnnnnnnnnnnnnnnnnnnnnnnnnnnnnnnnnnnnnnnnnnnnnnnnnnnnnnnnnnnnnnnnnnnnnnnnnnnnnnnnnnnnnnnnnnnnnnnnnnnnnnnnnnnnnnnnnnnnnnnnnnnnnnnnnnnnnnnnnnnnnnnnnnnnnnnnnnnnnnnnnnnnnnnnnnnnnnnnnnnnnnnnnnnnnnnnnnnnnnnnnnnnnnnnnnnnnnnnnnnnnnnnnnnnnnnnnnnnnnnnnnnnnnnnnnnnnnnnnnnnnnnnnnnnnnnnnnnnnnnnnnnnnnnnnnnnnnnnnnnnnnnnnnnnnnnnnnnnnnnnnnnnnnnnnnnnnnnnnnnnnnnnnnnnnnnnnnnnnnnnnnnnnnnnnnncgggggggtcgggtccgctggaggtacggagaagatcggtggggtataaagggggttgtgcccaatgaggtctgaggtaaagtaaactttcatatttttgggaacgaagggatgatcaacgccaggttcggcgtttgagacattaggtgtctcaactccacaaaatcaccatgtgacgcgacaaagatcagcaaggttttcaaactgggtccggggtccggggtactaccgttgctgcacagtatctggggtaggtaattactttggggtaactactttgctgcagggcttgaaaatatattgcgtctatatatgtgaaaagagcttatttttgattgaaaggagtttgagtaaactaaatatccagggtacatctgtattgtttcccattggcctttcactaaatatccgtccctcgcgtcccattttacttggctgatgaacccgcctttcaaaacgcctgtacgcacgcgcaattctgcaaactaggtctaccaggtagagctgtgatcaatccgacttcttctgaagttgcgatagtcccgggacatggctagagagatcacccacgggaagccgcagagggaaatcgacggattcaagcaacaaagaaaagagtaaataccatccaccgaggcatgctgcgaatagcacagctcctccgccctgaaatgagatcgattgcgtcagtaacgagaaaattaaagataccgctaggggactcactatttggaacttcccagcaagtactgtctcctgcatagccaagtaccagtaggcagcattgatgaggccaactccaataaccacggtgaaaaggatatagacaaggacaaaattggtccggaaggagcagatcaagtaaaagaagcatagaagattgaaacaaactatgaaaaatcctgtataccatttgatcgttagaatcttgttcacgctttgctcaaaaagcaaggtcggaagaatgcggtggttgactaaccaaagctggcattgaaaccctccgatgtgagtcctgcagtgggatcatcagggtttggtgaataggctgcgtaggcattgtagaagggctgtagggtcgtggcgagggtgaggtagaagcatgctgcatcattgatgttattagtatttgacatatatttggaaaggccacgagcacagtatcacttaccaaaggacatgaacaccacggatgagaaggtgttaccgattatacactctagcaatccaccaacaagcaagagaatgcctccgaagaagatgtatgctccactgaaagaatagcgagttagcatgcgcccctgaatatggaatcagactgattccaattactcacatatgagcaattccattgttgccagctcctctccagcccatgagggaaaaagagagaggagtcaaggccatgacgaatcctgtgatggctctacgctggtgtcagtcatttcctagaaggggtgatcggaacacagctgccatacataggggttggattgccaatgatactccgaaggtttccagcaacttgaggtttcggattcaagtaaagcttctcaaagagttccggagatagcatgatgcttcctctagacctggtcctctcaaaggcactagagtctccattttccgcatgctgaacgtcgttggcaaagttcacgccctcggaagtgctcgaatcagatgttttagccatgtttggtaagatataatggtgaaaataggggtgttggcaaagatagaattaaaagcagcttcaaacacatggacacttcctaagcaatatataccgtggtaattactagctacataccaggatctaatgggaccaaactttccttgcctgtttggattctggggtaccggaaacgtcctgcgagcagctcacagcagaaaaagcttccactagtgagtctagacgggattccaaatgttgtagatctacatcgcccccgcgttgaagcagagcggcagcagatagtttgtgggggtgggcgtaagctatcgattcggatatacggagaaggagaagcagctcctgcgaatcaacatgcgaatagcttccgccatcgcgaaccccgcattccagcccctattcatggtcggaggagcggatgcgctctgcaagacccctagaacctggagtagtggagtgcggtggagccgatgatgcggggccccgtaaaaaggcgaagctggggttacagccaccttgccgccttggaatttgactggtcattcctcccatcctacattcccaacccaagtcggaaccgctccccacgtcgagaaactcccaccttcgcgaaacgatcaagatgtgtgcctcagcggttccaaacaagttcaccgaataccaagatagcacgctcacctgagcaagtggattggattaattaggtgcccccgaaaaagttataaatcccctcaactatccttctttctcgatactcataccatccgaagagaacaatacatcctcttcaaaacttcttgcctttattataaattttcccttatcggtctttccacaatggccagcgcagacatccagcagaatatcccctcgcacatccgtggagtgcccggctcagtcaacataccagtagcaagcttcccagttccctccaagtgtgccacatgtgaaccagaacacgttgcatcgacacttgttgaggctttcaaccttgccttggccaaacgtgacttcaacggcatcgccaacttattcggagacaatggcttctggcgcgaccatctagctctgacctggcagcttcgaacagtgcaaggccacgaagcgatcgtgaaattccttgagagatcttccgagtccagggacggcctgcgactcaagaaaatctctattgacagaagcacccccgttcgcgccccgaaagtgtggtcacttgatggagctggcgaagttcaaggtatccaatttttcttcaaggcagagacatcccatggctctgcgaccggaatcgcccgcctcgcgctgcagaaccacacgtggaaaatattcaccttgttcactggtcttcaagagctcaagggccatgaggagcttcttggacgtcggaggcccaagggcgcagagcacggtggtaacccggatcgcaagaattgggccgaaaaaagagccgactctgctgcttacactgacggtcgcgagccaagtgtgctgattatcggtaagtttctatcttttcatcattttgaagaacccagctaatccttatttcaaaggcggcggacagggcggtttgaccgcagctgcgagattgaagatgctcggagtggactccctcatcatcgataaaaacgagtccgtcggggataactggcgactccgataccgtcagcttgtcctgcacgatcccgtgtggtacgatcacatgccctacatggagttcccagcgacttggcctatcttcaccccgaaggataagctggctgaattcttcgagtgctacgtcaaaatgctcgaactcaatgtttggaccacaaccactatcaccaattgcgaatggaatgagaagactgccaactggaccgtgaccctttctcgcaaacagaaggacggtaccactgaagagagagtgttccacccgcgccatatcatccaagcgaccggtcattccggaaagatgaagatgcctgaagtccccggcgtggacggcttccagggtgaccttctttgtcactcctcgcaattcccaggtgccaagagaaacagccaaggcaaaaaggctatcgttgtgggctcatgcaattccgcccacgatattgcacaagattatcaagagagaggctacgatatcactatggtccagagatccacaacctgcattatctcctcaactgccatcacaaagatcggtctgaagggcctttacgaagaggatggtcccgcattggcagatgccgatctccttctccatggcactcccacaccagttatgaaagcgcttcagatccatatcacttcccaagaagcagagcatgataaggagcttctcgaggggcttgaaaaggcaggattcaaggttgatcgtggtccaaatggcggcggactcttcgtcaaatatttccagcgcggtggcggctactatatcgacgtcggagcctcccaaatgatcgtggatggcaagatcaaggtgaagcaaggccaggagattgctgaaattctgcctcgaggcctcaaatttgccgatggcactgagctcgaagccgatgagattatcttcgctactggatacgacaatatgcgctcgcaaacaaggacgatgctgggcgacaaggtcgctgataaggtgtctgatgtttggggctacaataacgaaggagaaattaggaccatgtggcagaatagtgggcacccaggattctacttccatggaggcaatctggcgactgcaagatactattctaagattctggcactccagatcaaggctcttgaggaaggtatctataaccatggtgaattctaagcggacgggtacggatatattgtttcaacatcatctacaatttgtttttcctccaatgcttgttctctaactatatcaaattcatttatcaactccaagattgacttttccaatatttgaatgtatcagtactccgtacagcagggtgtaataccttgggcagcggggcagcgaaaccgaatcgccggtgcatctcggttctcgtactaggtgggtcaggacaatgagatgaatccacacccgtgcaaaggcatacgtatgtttttgcctaacatggaacgaagcattgcccataagaaatgatcaacgagcaaataaccacttctggccctgaagacttccatgatctgcatagtttgttgggatatccgattaaccagccacaatattgggaaaatagaacccaacaaccatacgagatcctgaaggatccacttgtatgggtcttcctgggcaaatattttccccatattggttgtctgtctactgtatcatgtgagattggtttgctgaatttctagcagactgctatatccatgcatactacgagctacaaacccaattcaggtctactacccatatcactcaaatgaagaccatgaaagtatcgaacgacgccaggaacaggtctctgcatctgtggttggacggggaacagacggaccccattgctttgcaggagaacagtggatctattagacctgtatcctccgatctgctcggagttgccgcctgaagggtccacgagtatgtatgaagtttcaatatccgtatcgttttgtttcctgaatctccttataatggacatctgctctcgcagcaaaagtcgctcgcaattgaacaccctggaggacgcggccagctacgcacacgctacgtaaccatctaaacctgtctgttcgctcacattcactcccctaatattcggcatactaactaaaagtcttcgttgaagttcaattgaacgctagctatgcctttcgaaactcaggagccctggaaaagacagttctacagtggtaccgaatgtcccgagcatgtagtcattccattgaaggactacaatgcgtaccgcctcaatccggtgcaccgatgggtgtacaataagctggaaatcgcagagaagcagggactggcgtgtgcaccacatggaatagctcctgagaaattccctgtcttcagcaagccgatttacaacatcaggaatcttggagcgggaaccagaattcttgaagacatggaagactaccgtgagcactgctcgtcgggacatatgtggtcagagcttcttgaaggtgaccacatcagcactgacgtggcggttctcaatggcaaagtagtctggctatcccacacgctgggcattccctctggcggcggcaccttcgacagatgggaagtcaatatcgctgtaccacagcaggacgagcgaacactcgtggattttatagagctacacttgccagactacacaggcatgctcaacgccgagatgattggtggaaagattatcgagatgcacctgcgcttcaccaaccaatggcccgacctctatccgcgcgggtttttggatgccgtggttgggttgtatcaagggaaatggtgtccaactgccgagatggcggtcaatgacactcgaggattcagcgttgtcttgtttggtaccccgaaatcagagtcgtgggtgaagcccgagatgtcgctagttgaggccctccgctctcgccactctttgtacagcgtgcagatgcccttcactgagggcattccggctcgtcaccactctcaccctccagggggttatcagcttgcaactttcaatgggcccgatctaattcagtgcctgaaggcgcgggaggacttcaagaagttatttagtgctgttaacagttggtctagcatcacagcaagccacgtctaggtctattccatagagtgccacttggatgcatcagcacatagcgtctgagaaaatatgttgtcgcaatacgtcacatctctacgattaagcctctgtaatctgaatcccgctgtccatttctagccaatggatttcaataatcaattttgaccaacccaatggccacgatgcgttcctctcacgccgttgattcttggagtcagaattttcatgatctactatagatcgctatcacatgcttcatgtttgcttgcttgctcatttgcagaaactccagcgataaaagcaagccatctcctacttctgtacttgcttattctttccgtctctatcttactcccatcttactctcatcttactctttctccacatcaacatccacgtcatcaacctacagcgtccacccggcaccatcgaaccggcaccgtccatctcccattttcgacatcgacaccgattccccaccatccatctccgcatccaatcctacgtacttgcttatggactatgggttccctctctgatatgtcgtcaggcagtctgggtcctcccgtatcggaagcgcaatttgatgcctacacagctgcccggcagaagatgttcgctaggctgcataactatcaatcgctgaatgacgatgacgatacggtccacttcctggggtcatcttactctcattctgaattgaattcactctttcttcaagggataaacctggcatgtcacaagaataataccagtgtcacctccgacctcgccgagtttgtacagtcttttgaatgggaaaaagtactcttcttcctggccttacagaatcaagtgtcgaggcagcaacaattccctaataataatgtagcttctagttagttagtgactgttcattactaactattactaactatgactcataatgcgaattgacatgtagttagttaaaggtcaatcgatttatcaccaaacactacgtgaagaagaatcatgtcgagagcaaccatgtccacaatcactctgcacagcttcgctgcctccccgtttggcgaaaaggtgcgccttatcctaggcttgaaaggtttggtatggcagtcagtggatgcggaactcattctaccaaagcctggcctcacagccttgacaggaggatatcgaaaaactccagtcctgcagatcggcgccgacatttactgcgattctcggctcatcgcggaagagttggaaacgcgatatcccattcccaccatctttcctggcaactccaaaggactgtgcttggcgttgtctagttggagtgacagagacttgcatattgctagctctggacttgtcatcggagtcaacaaatcaaaattcccacctgatttaatggccgatcgagagaagtttttcgaaggtttcatggacttgcaccgtcttgaagaggatgtgcctcacctcaagactcaattacgcgcacatgcaagtttgattgaggaacagcttagtgacagccgttcgttctggctgggtgaagcgccgagtcttgctgatttccatgcttacgttgacatttggacggcacgcgtttacttggattttgcacaagaactgttcaaaaatttccacaagatgtctctatgggaagagagagtacggaagattggccacggaagcaaccgggtcattgatattgcggaagcacacgagtcggctcgttgcagcacacctcttcccggtcacggcgtagattccgaggatgcacttggactttcgcgtggggatgatgtgatagttacgccagacgactacggacagggacataccactgggcgcctagtgactttgacaacgcgagaggttgcccttgtgcgtgatgatcctcttgtaggacaggtggtcgtacacttccctcgtattgggtttcgcatctcccgttcttcgaaaccctagctagggagcccttcatttatattagatctgtacttctccacacataagcacgatggaaagaggcaaagggaggtctgtcaacctgcattcaggcagccaaagtcttaatgcatcactattgtttacatatctccagtcttttatgttgtgctatttggaggctttggaaaaatcccggaacgatattcatatgagagatgtcaaagaaaaggcaactcaaaagacagctagacagatgtcgtatctttcatactagtacagatctagatctagattcatgtcatacaactcatttcatatagctcatgccatctcaatctgctcatcttcggcacccttcttcgtgactgtcacatcatcagagggaataacatatgtcgcccactgacgagcaggaaccttgtcctgaaagagtctctcgatttccgcattgctgcgacctgcagtctcaccaacacagaaccacgaatatgctagcaaagacgtggttgttgctccgtagacaaaaccgatcatcggacctaaatgacccgtgtagtacatataggggctggtgaagaccataacccagagcgtgaggaagaagacgcccatggcgcacgcggtgatcttgtttctgttgcggccaacggacatttccgatgcaatagtgtacgagagggtcccgatggagaagttgtagaagatgatgttgatgtaggcgagaacaacgatgccgatgccgatgccacggctgaaggttccatcggatgctttggtggtgccgaggccgccgacggcaattagggagatgaacataccccctgagcagacgaggaggttcgtgcggcggttgatcttgtttccgagaacgactgctaggccgacggtaatgatttgtaggacatagatgatggtgttgatggtgaaaggatctgaaacaccgatggactgggcgaacacaacgccataggtgtaccagaattgaataccattaatctgctgcacgaacatgacgccacaggcgtagaagagcttgcggcgctcaatgggatccatgatgagtgagacccaggtagcgtccttggccatttcacgctccatctgaacttggtcttcgatagcttgtatgtccgctgagggatcatagtcgcggcagctgtggttgattcggcggagagctttgatggctttctcacgcttgcctttgtacatgtaccacactggactctcaggtgtgaaaggaaggcacagaagcaagataccgggaagaacaaccagcaggcacatgggaatgcgataagattgagaactggaaatgctctgggtgccttggttgacacaggctccgactaactgcgagatagactgcatgaactggaagcacatgagggccggacctctgatggcagacggcgccacctctccaatgtacatcaggcaagtagcggtgaactgtccaatacctagaccaatcaacacacgactgacatagaagactgagtcagagccaaatgagcacacttgcacgatggctccaacaatgatacaaagagaagccgacaggaatacagcacgcctgccgaagaagtcattgatgggagcggcgccaatagctccaactaactctccgacatagatgatgctagcagacaccgagaggaacgatgtcccaagagagtatgacccatctgcatttctctccccgtagtccttggcaaaccatgtcataccctgaatcccagtatagtagatcgtatcgtaaccgtagcagagagcaccgatggcagccaccatacagtaagcgatggcccgccgattcgacttccagtcgatcttgagatcaagacctgccatgttcgaagatctacgtttttgaggtaaaaaacagtaaactcaatagacttagaagcccacagaggaaaaagagaatttcagaagaatcgaaccaaccggtttgcaggggaacgatcgtatatatacctttttttatagaggaaaagttcaattattgccagaccaaaccaagaacccggaggcccgcatgtcggggtaaactccatggggtatgcgggccatagccgagtattttcgaagtctccatctaataggacccctggggccccccttccccccggctgatatgtagaccaagacatattttatagtgtgggtctccgcgttattcacgcactcacaggagctttttacatgaagagttttaccccagacactttgaagaaagaggcagcttcactatttgtagatgtcttcgagcaaagatctcatgttggaagagggcagatcgggctataagccgacaagatagcagcagaatttcggcaagtggtcgccgccaagcggaatcccgaaacggggatgtcgccgaaatttgacgataatttcgccatgcggccagtcaaagtttcaagatttcaaaaaactaccgcggcacaagcctttgtcgaggaaactggagtaatcggggtaatcggtaaccttgaaagagaagggctaccgacaatctttatctagcgatataatccgctagactaatttaggtaagtctgccgctggccgcaattctagaggagcttatgaagattaatatggtactcttgatacatatcacatgacctggagccagttgaaaattgcggccagcggcaggtgtacctaaattagtttagcggggactgtgaagattgtcggtagctcttccctttcgggatttctaggcgggtctttccatactccaacatccggggtggactatagattcgcttgcaatagccataaaaccatttctatcggattataccgggtcagagaaactgtgattttatctttatattggctctatcggcaacactccggtatttctttggccaaggtttcgtgagtcaagattttagcacgagaggactaccgaaacttggccaaacgacaaatcgggaataacacggctcagctagaatcccgtgaatccaatagtgcaaattcgggaaagagaggcattcaatgtagccgataactaacaaggatgtactgctactctcataattagcctctaaataaaacatgatagcaagcccatcatgcaaagaatttcgaagtcagaggaagcacacaatagaaactagaaggggcccttttcacatgcatctcagctaccttcgttaacgtatcacgtagggcttgtcacgattggcacttgcgaaactcgtactttcccgttcgggattgtaccgttggtcgttccttcctgttcgagggaactcgtttgcgcagacagtcgtaccttccttctgggataaacgaggatagggctttgcccccgaaggggtataaagaccccattgttgtttaacgtttgttttcttttctttccttctacatacttgatattcgatgagcaatgcacttcttttgttagaaagaacctggcacgtcacagggcttggccaattgtattcagatgcatggtacccaaccccaactccaagtatgaaaagataataaggggatatatccacatcaggaatggatggaataagtcaatgaatgtctagaccgaaagatctgcgtaagggagccaacttcatctacagtcaatttgtgcggcggtgtttatttgtcagtgagaatctacttcataccccatatgacgtgacatattccaacgtatgaacctatagccattgccgttaaggccaacgcatcaagagtgtcgagtgaataccaagccctcaaatgtttcagcgggaatatcaaactccttccgttctaagtccgactaagtgcctgcgcgtggcaccccagaagacctccacttgccaagaataaaacctggttagtctggacgtgtagcttcttctgcgagttacattaactagcgagaaaatcggtgtcggcataggaattactcgattcggaacctatacggggtttgatatggagttgagccttgccctcacaacgactctacatgtatatcttccaatggacaggggttaatgctcagcatttactattgtcgaataaaattgtaagaaagacctgtactcaaagctgccatgcctgttgcagacctaggttatgtgggccgaatacagcagatgactccgagtgccagtgtacttagaaacccaatgattgttggcattctgcaaaacaattagtaggtttacaatctagacatagccatatcctaagcatggtgtttgagaaggaaaaggcttaaagaatgagagttgttagacaaaagagcctgtgtccttctctttaggccgttcttaaaaaccgaagttcgacggttgatagatctaactgaattagcagaagccctaggggtccactactgctaactgttcaagaattgctgcgaaggaaaatatgatgctggagacaaaaatggaaaaaaggggtattttactcagccaccctccgtattcaaaatgagccgaatgactccaaaaagtttagaggagacatccatattcccgaatcaagagaaaatgcggttgggacattagactatgaacaattcccataattcaagcagcaccagaggacactgagaatcattagtgttgctcgacaccaatattcctttctatatacacgtctcagtcaatgacacttttctcgtcagcccagctaggctgaatagaccggcaaacagcctcataatcctggaagcgctgggtatcctccaccagcccaggcgttgtccagaacatagcccagttactatcagccagcttccaagtacccgaagaccgctcgaagtaccatttattaaccgggttgtccatgcgactacgccagcagactccattggggaaacatgtgcgcaccatcgcgttgaacacaatgtcggcgacaccccccgcgccttggctgcgcttgagcacggcgaatttatccaaatagggcaccatgcgcgcggcactggcttcgcttccgtcgtctggtacgcccggcggcgtttcccaggtcaggattgcgccgccttcgtactcaccggcgacgatgataccggcgatacggctgttcactcggtcgaggtagttttggacgttgagtttgcggtcaaaggagtcttcgattagggtgactagacgggggagatcaatagaagggtcgttcaatcccagtcgcggttggatctgggctgtccaggggtgtgtgtaggggtttgggaggattgtgagaggcattccacgtttcacaaaggtcgtgtgggagctaactgggttaaatgggctggatccgccattggaagcaccgcgtcgacctgggggtagggaggatgatagtagaggcttgtcggtgaggaggtggtggattaatgggttgcgctgtcgacgggttccaaccgctgacgggtctgaagcggcctcttttggtgaacgcgctgagtaagaaacttcttgtggggaggtaatgatgcctgaagaggcggacggtagcatggctaatgcttgttgggttaatctgagattctccaaatggccatctagcacctcctccatcgcctcggcagctggtgattgagcgggtgcggtaggtggcataggcgagacaacctcgcgattgacgaattttgagaacgggttactctccaagactgggtaagtggcttccgtagttacctgtttcgagggatctttgtggccagaaatagagtttcgtgcctgggaaagctcatcttcaatttgatcaaactcttgctccatgttgatgaagacgtgcgatgattgagggcccttgaaagctgggatgcccccaagcgcatcgagaacaatgacacggtccagagagacctccctttgtagagtattgattctctcggcagttactgctggatcttcgtccgggtctggatttgttgacagtcccgcaaattctttcgtcagtgcaagggtagcatcatcagctgaaactgtcacggctcgtgggttttcctccgtataggcaatgggcggaacaagtacgacatggccatcccgaaggacgctcaagagcatttttcgcgacaacaccgtgggttgaccagatccccgctcggatatagataacgccgagtctagtctgaaagattttgagtccggctgctcatcgattgcccccgatatccgatttgcctgttcaatggatatttgtcgcccggcagggccgcccatcttcccggggtcgacaactacacagcatgccatgcccaggcggacgagctgcgagagggtcttcgccactcccttaatgacagaatcatcgagcaattgtggagtggtgattttgatcagggccaagtgcagcctttcaggtataacctgcgcgcgcggagtaggagttgtatcttgccggaagacagggctatcgtacaccgccctagaagcaccgtagaatgagcccaaattgacaccggagggcagagatcctggtatcggctccttcggaggctcggtagattcttggctcgatttggcggggctggcctttagccgagctaagtacgacctagcttcacgcttagtcgatgcggagctcaggaggctaagaaagaattcctaagccgaacatgccgctgttagcatatgaacagaaagaaaagaagaatagtaatatgccacctacccgatcaagcaatttctcctttgcgcggtggccgaggcgatcttggctttcgctgctacccgagaactcggcgaattgctgggctcggacattcagcgcctgtgccggtcgcgccgtaatggggtcactaggacgaacgagatgttgctgcagacttctagtcaataaatgcttagcattggcggggtataccggttttaattaccttcaccagtgaggacttggccgttcgagaccagttgaacgttcgggaggtcattgttgggtgtatatagttgacgccaatgcaagagcatcggagaaacaacctcaccacaaatcaacagtaaacatataatataggggaacgagtcaagatcaaacaaatctttctgagggaaaagaaaataatatgacgcatcctcggctaggtatagctcaccgcctgtggataccgagattgataagaaaggctgtccacttctgtccacttcagggctataaattgtacatgtctgttctgtacactccatacaaggatattagtggactaggacttaacggaaatagactgcgttttaaatgcagctacctatcctggtacagagtgtataagaaaatctacccactttcgagaaatatataatcaaccataacagctggtggttataaatagcaaaatgatgttacatgttgtacatacagtccaacccttcttaggtttaggtctcttcaagcataaaataaacacaaagatcaaagaaaggaattgaacttttttatactgcctaacaataaatttagaaagaaatacaacctattcgaatcacccacgtcattttcgggaccaaaatgctcgctgatttcgtatagtacttttgatatagctagcactagagtccaccggtgtactatccactcctctatgacctacatataccctaaagggaaccttggaagtatagtcagggtcaagggttctagaagccagtagcccgttttatacgtgtagaccgctttgggcaaaatgtaacagtacgagggggatacatcgtaatctatggcgaatccggcctggaacggggtactgaaaggttcctatactttagcggttgaacctcccccgccactgcaaaagttgctcatcctcgtcatctaaaaaaaagaatacctgcttgaaacacgcctctgaaccaccgaagactcatcaaatattgtcaaatatcaaatccaagtaagtgcgcccgctcctctctcctccccctcttcaaatccaaccccggtcgcaacacccctccttgcaatacagcgcaaatccctatgaattgcccaacatcccctaaggattgctcggaatcactaggaacaatagctgtcaatttactgtggtaattggcactgtctgtttcgactattggtcctatttacctgcttgagattgatccccaccattttagatttacagccctcgtacgccaccacgccgcttacccttcctgcaatccaattgatcgtggcaccctagcctggtctcaccgtcggaaattttgatcccaaccgcctcgaccctcgataccccagtcaagttctttatcctcactatgtccgatcagagcgaatacctctccgactccatgtccggccaggacaacgggctcaggccgttgtctaatgcggacgacttgtctctcggaaaccctaacagcgatttggctcgtatcatgagccgtgctggcattcaattagccaatggatttccagtcgatgacgacgaggacgacgacgaggacgagctggatgaggactattctgccgttgatcaggatgacgacgcaaacgatttcccatactggttccgccgcccaccctcccacaaccgcacaaagctggatgagctgcatccttttgttcaattgctctccatatctaatgtggaagattgtgtgaaagtggaggaagctttccccgagcaggagcgttgctctcccgataaggtatggctacccggattcaattacaccatagagcatcaattcaacattcaaatcatctcacttgatatgaattgatgcgacttcagacggatggagacttcattgctaataatttcatagttccgctaccgtctcagcagatgccccgagctcagcctgggcctcttcactcttcctttgctcgcagaaggagaaacaaaacctcgcccaacgctcgtcggacacatcattgccactcgcacttcagagcccattgtgacagatcggtcgatgcaacttccgaccaactggaaaaacgagcgttggtccattgaggacggacaagctgttggtcacgaagaaggcggtcgcactattgccattcattcgcttgctgtggacccaaagcatcagggcaagcaggtcggaagcacattgatgaagtcatatatccaccgtattagagaggcccagattgctgatcgcatcgcgatcattgtacacgatcacctgatccccttctacgagtcatttggcttcgagtcccatggccctagcaagtgccagttcggtgggggtaattgggtcgatatggtatgttctctttttaactgtcagcaaatatatactgaccctaaatagatcttggagtttggccccgagcctcttgaggagtaggaagtttttcgtgtcgttttttttaaccctctttatttaccctcttctttttctatcttttcggcttggggcatgttaaccactgacgggttcaacccgttcttattacacacatccatgtttttgtctcatctcaagggtttatcctagacgggctttcacaagaaaagcaacggagtttctttgggcgggattacttttatgaatctgggcagaaacggcttgggcttcccgaatcggtcacaagggcatgtgtaccatagttgacgacaatgctattatgaggatgattgtttgattccggccagagatagttatcaacttccaaatatcctatatataaatcctcgaggcatgaaatcgagccctcgatcattttgttccatattgtatcacgtgactcggctatatcccggttcgtccaatcctggtccccgcatttgccttccgcccggcagaaaaaaaggactgccaacaattttttcatggagaaaaacccactctatcaacacccattcactcacggcattacttcaagagtcattatttaatttgactcctgacttgtgcccattatgaagacgacgtggaaggatgtgagtcaatttcccgactgcccttttgcgctagatttgactgagcagagtgctaatgtatttttcaccgcttggtagattgcgcctgtgccgacacaccaggaattcttggatattgtcttgagtcgcactcagagacagcttcccacacagattcgtgctggtttcaagatcagccgtatcagaggtatgatcacattcttttcatctgatccaacatcggcaaaaaaaagttatcgcggttatcgataaagcacaatttctgatcgaattttctttccatcagggttctacaccagaaaggtcaaatatacacaggagactttcggtgaaaagttccagcacatcctcgatggatttcctcgtctgcaggatatccatcctttccgtaagttttactcctatggcgattatggttgctcgggtggggtctaatatccaccagacaaggatttgatgaacactctttatgatgccgaccacttccgtatcgcccttggtcaagtctcgaccgccaagcacctgattgaaaccgtttctcgcgattacgtccgtctcatcaagtatgcacagtctttgttccagtgcaagcagctcaagcgcgctgcactcggtcgcatggcaaccatcacccgccgtctgaaggaccctctcgtctacctggagcaggtccgccagcacttgggtcgtctgccctcgatcgaccccaacactcgtactcttttgatctgtggataccccaacgtcggaaagtcaagcttcctgcgcaatattacccgcgcagacgttgatgttcagccctacgctttcactactaagagtttgttcgttggccatttcgattacaaatacctccgtttccaggccattgatacccccggaattctggaccaccctctggaggagatgaacaccattgaaatgcaatcgatcaccgctgttgctcacttgcggtccgctatcctctacttcatggatctttccgagcagtgtggatattccgtcggcgatcagatcaagcttttccacagcatcaagcccttgtttgccaacaaaattgtgtttattgtcgttaacaagattgatgtgcgtcgtcccgaggacctggagcctgagtaccaggagcagctgcaagagatcctcaaggcagaggatgtcgagatgctgcaggtttcctgcaccaccaccgaaggtgtcaccgccgtcaagaacgctgcctgcgacaagctccttgctgagcgagtctcccagaagctcaagtccggctccaccgctgccacccccggcagccgtctcggcgacgttttgtcccgtatccacgtggctcagcccatgggtggtctgcgtgagaccttcattcccgaggccgtcaaggacctcaagaagtacgacaagaacgaccccaaccgccggagactggaacgcgatatcgaagaggagaacggcggtgccggtgtctacaacttcgacatgcagcgcgactacactcttggcaacgatgagtggaaccacgataagattcccgaggtgtggaagggcaagaacatctacgactttgtggatccggatatcgagagcaagctcgccgccctcgaggaggaagaggagaagctcgaggccgatggctattacgagtccgacgagagcgtggaagacgtcgaagacgccgacaaccgcttgaaggccgatctcatccgcgagaagcgcgtgctgatgcgcaacgaagccaagatgcgcaagtcgctgaagaaccgcgccgccatcccccgcagcgcaaagtccaagaagctgtccgagatgaccagggggctggactccgctggctacgacaatgccgcagctgggtctcgtgcccgtgccgccaaccagcctcgcggccgtgcgtctgtccgtgagcctactgcggaccccgatgccatggacgtcgacgacaacccacacaaggcccttgctcgcgctaagagccgtgcccgcagcacacctgcaactgatcgtcgtctcgacggtgtcaccaccttcaccaaccgtgataaggctgagcgtatggccaagttgggccagaagaagatgaaccgtatggctcgtgctggtgaggctgatcgtcacacaaccgcctctcttgacaagcacttggtatgtttttctatactatcctttttttcgggtttatttgctaactattctctcttcagtacgccggaaagcgtggtatgggcaagacagatcgtcgttagaagccccgctgatgccgatgcggcttcaacgagacccattcttaatcattgtccattggtttcgatgccgggtgcaaaatggtgttgggcgtttaatatttcaaattttttttcccctccgagtttcgtccaaatgttcatttgacgcgcatttttggtttccacgactgtttactgtggatgatttatgtttatttgacacagtaatgatttgtgggagttcgttctcctggtcaataggacgaaaaagttctataacttgatgatcttgcatataccgccaatacagatgatctttggtttcatgtggtacaacacttagactccaatcctagtgtctacatttttaatcagcctttctcgtacggacttataccccaatgtgtaactaagatcacccttgggtagagacagttcgccggtgcttagctagttacatagagcagctggttacgtcctcagaagcattggtccctaggtgcattaaccggtgggctgaaaggctgaaaggctgaaaggttattaatagcaatgttcaccaatcatacgattcttcctatggttgtgatcatttgataaggtagcctagcatttatgtagcacaacttagaaagaaaaataatgttaaggaaagcccgaaagtagtgaaggcacagttgaatcaaactttaagcatgcaacaagcataatgcttattagagggttaatatccattgacatatggggcccccactcttctaggtctagatacatagcatgatagctcgggtgacttttgcaagttgcaagttctctgacaatatcatggtagaacagaacagagcagatcctatgtagtatatggcgaggttaacagcccacccttggatgtccgcaactaaccgagcaccgggttataaacaatgacggcatcggacatgtgctaaactgaacaagatgccttcctgtcataaaggatcggagataagcattgtcgcctgtgcaatggggtagttgcttttcatggggagaggcgggggtggcttatttgggttgtatggcatgctatacagaagtacaacatatacggaatactccgttatagttatattgtatatagtgtagacgtcattatggttgtgtctcagaagattagacaaggctgaccaatatttgttcattgaacttgatttatccaaatgttcctaatatggcatggggtaaagatctactgtcaggcaaactctaaatccttgccctaggttgttaaatcaaacagcattaggtataatatactcagtaagatgatttgttgtgtttagataaagaccccagaatacttcaactcactatatgttcattatgccacgtataacatacacaaagcctgcggggctggtcaggtttgccccggaaatcggtccaatctagggttacatgcgaaaaagtcagctcacacagacataaggctggattgagtttatttcctagtcggagactaactaaaggaggtttagggtgtccacaaagtttttttctgttttcacaatggcctgataccggtcagagtttttttctaggggattttcattttaggtctaggccgaacaagggatgccgcgaaagacgatgacgaacataccgaaaggcgaatatcatagggaaaacggaatcatgctacggactacggagtactccgtagggctttaagtattgtattcatgaagatccatgaagtatctataatgttccaatccatatatatggtacatatcttttggtacacggtacatgtgtgttttcggctatgccgactcgggattccactcggctcggcagagaaaggacattcggtgtgccgattgagaagaagtggatacaagatcaacacagcggaaacatctcataggagtcggctcggccgaagccttaacggtagtggttttataggtagtcttttccgtgcccagcttggatttcgtcttattagcatgtttcgattcactaggatttgttcagggatacataagtaatgggactatctatctttgtgtgtagagcatctttgtttttcgtttgactttcctaattgagctatcaaatgcaatcagatattctagagctctcaattttaactatgatcagcgcccctatgcccggctagggagcagagtctacgtattatgacccactcgtaccttggtattactatttctttcttgtttgtttttttcggttttcgccttctcttttagggaatctatccggtttcagtcgcctttgtttccgtctatctatcatgccagcacagtttctaatctatccataccccggtcgtagaccctgtgaacacggcactagaacccgaggtgaaggcgaccacctggacatatacgtcactctaatagaagtgagttattatttttacattgtcgccaggaactagaaccagaaccagaagtatcatggtcactcttacgtatcgatatctggcactcggcctaggcaccgcattctcattcgcgcatttgcaccgaggacccagtatacctgactgaatcccgtatgtttctagaaggtggtgagaaggtcgggtgatcttttagtttttatgctcacacgttactgtttattgtttgatgtaagtgtttacattgtatggcctgtctgttccaaggttgcatagcctctgactatatcatgaatgcaatcaatttttagaacaaagtcatacaacatctacatgaatacgttttcagctcacgtgcattccaggtaccctaacattcccccgtcctccaccttctccaccataagaaaaaagaggaacctaaacccggagtatatggcgctagacattgaaaaggccaagaccttttagacccatggagtaaaattcataaccttataaaccccatttcacccatctcatgttcaaaaaactcattggacagtacaaactaagatccgcgcgcccccgtcttttgccggtcatagtactctacacatacggagtacccacggtaaccccaagggaaagggccacccccaagacttcccccagaaactatttagtgcctcctcttcctttctcttcgcctttttcctcttcagcttctttctatcatccccgtctgtctgttcatcatgggtgtctctaccttcatggataagatcaagcatgggaaggccgaatcccaggtctcctcccaggccagtcctgctcgtgccgactcgaccactgctgagaaggacaacctcaccctcgatgatagccccgtcaagtacctgacctggcggtctttcatcctcggtctgtgtgtctccatgggtggtttcattttcggatattctactggtaagtgtcacacagccctcaccactgtggatgcaacgttaataatagccgaacctcaggtcaaatctcgggtttcacgaccatgatcgatttcaaacagcgcttcgccgagtacaatgccgccactggagaatatgctttcagtaacgttcgcaacggtctgatcgtcggcctggtacgttcgagatgtcaatggattcccgcatgcaagtcttactcatactaactctatactagctctctatcggaactatgattggtgccctggtagctgctcccattgcagaccgcattggccgcaagtactccatctccttctgggccctcgtccacatcgtcggtatcattgtgcagattgccaccattgataaatggtaccaaatcgctctcggccgttgggttgctggtctgggtgtcggtgcgctttccagtgtcgtccccatgtaccagtctgagtctgcccctcgccaggtccgtggtgcgatggtcagtgctttccagctgttcgttgccttcggtatcttcatctcctacattgtcaacttcggcaccgagaccctcaagagcgacgcctcatggcgcatcaccatgggcattggcttcgcctggcccttgattcttgccatcggtaccctcttcttgcctgagtctcctcgttacgcctatggccacggtcgtgtcgaagaggcccgcgatgttatgtgcaagctctacggtgtcccccacaaccaccgtgtcgttgcccaggagatggccgatatgaagctaaagcatgaggaggagcttgcccacggcaaggctcactggcaagaggtcttcactggtccccgcatgatgcaccgtatcttgctcggtgttggtctgcagtctctgcaacagttgaccggtgccaacttcatcttctactatggaaccagtatcttccagggtattggtctgagcaactcttacgtcacctccatcattctcggtgccgtcaacttcggtatgaccctgcccggtctgtacatcgtcgaacactatggtcgccgcaagtgtctgatgtacggtgcggcttggatgtttgtctgtttcatgatctgggcctccgtcggccacgagatcctggtccaaaccccctcctcccaccccgccggtgttgccatgattgtcttcacctgcttcttcattgtgggcttcgccaccacctggggtcctatcgtttgggctatctgtggtgaaatgtaccccttcaagtaccgcgccgtctgcatgggtattgctaccgctgccaactggacctggaatttcttgatctccttcttcaccccgttcatctccaacactatcgacttccgctatggctacgtcttcgccgcctgctgcttcttagcggttatcgttgtcttccttttcgtcaatgagacccagggccggactctcgaagaggtcgacaccatgtacatcctccacgtcaagccctggaagtccgctggctgggttccccccgagggcatcgttgccgacctgcacggaccttctaccgaggcccccaaggacggtgaggccggtactagtgagcaccagcatcacgacggcgagcctcaggaggttgctgagaaataatgcgataatggctgaaatgatagcgtgtatcgcgcggcgcttgcgtggatgctttttcacaaaattctgtgttcatacttaactctactccgggatcatttgagtctccaccatattcctagggagaccatgatttaatagctacaagccaggcttgttttagcaatctcattttcttatcaaattaattcaaatcagctgtaagacacgcaactagatctaattctcacattaacttcattgattcccgaattccatcccagctccctttctagccgccccgtaaacagcagcaacatctcccttgtcccccctaacctccttaacgacctctagaagcccatccataacctcgacgtttttcatcctcagtcctccctccttcgcaatcccataagcatgtctcagatccttcctagcaagatcaactgcaaagagcggctcgtcccgggtacaataatccccgcccaccatcctctgcgcataattagcaaacgggcccggcgcaaaaagcccaagccattcttgcagcggctcaactcccagcccagacgcctcagcggcaacaagggcctcagcaagaacaccaaccgtattgagaatgaacgtgttaccgagtaatttcagcgtcgacgcccgtccaacatctatatcacctcccctcccagacgaaagatcaatcgtcttcttagacacgacaccgtcgaaaaacggtcgcactttctcaattgccgcacgcttcccagccggaacgacgataagctgtcccgcatctgccatattcggtgccccgaagaccggacacgcgacgaaccccgctccccgctcattgaaggcggcctcggtttgtcgcgatgtatccgggtgcacggtcgagcaatcgatgaagatcttgtcggacaggtcttgcgggattgtagggtccgataggattgccgtgacgattgagtccagggcggcgtcgtcgccgacgcaggtgaagatcaggtcggattggtttactgcttccgggagggtagttacggctttggcgtttgggagtttcgaggcgtgggcggttgctcgtgcggttgtgcggttgtagaggaggagggggccggtttggggtcctttttcggcgatgttttggctcatgccctgcgattgcggattagatgaggttgctttttggttgcggtgcggattggcttactcggccgatgttgccgagacctatccatgcgactcgaggccctgccattattgcgtagtaggtatagatggatgtgtatagaaagactgtaagtgtaagagtgttcggggtgttcggggaagtatcggggccttatacgggtgggatgtggggtgtggggtaaagtggctcatggctcagttcttagccgattgtcgggcgacaatatatacgaagtatccagtaggctaaagggttgattgcatggtaattcgccatggcttgcctgtacttattcctccatgttcgaatactgcattcgcttttcaagggttcagttgtgacatacaaaaacgtgtaatgtggccaagagctgccctagaaaaacagattgagaaaagcatatagaattagagaaaaatcgatacgactcgatattcgcaaaacataatatccaacctaaagcctcgacttctcagcaatcgcaatatcctgaaacggcaacccgagatacatccacatgaaggcaaacctatatcaatcagcatcccatacatcgcataaagaccatataaaacctaccgatcactaccaaaaaacggctccccttttccttcggaatttcgcacccaaaaccacggggcgccataagcccccttatcaagagcaatctgcgtattagccgtcaaagcctgcttgatctccgggcttgatgccgcagccagaatctccctgacttccgaatcagagtacccattgctctggagtagctcggttaggttttctggcttgctgatgtcgatacccttgtagtacatccactcccacagcgacaggaaggttgtttcgtacttctcgcgtgggaagtggttttttatgtagatcatgcatcgttggggctggctggttagtggctgagaacatttcgaagatatagagaggattatataccaggattgacaggattgggaagaactctggtgtttggatctgcggaactccaaagtatttacatgctcgctccgagtcgaatttggaatacgttgctttggcggggagtgaccaggggggtttattccctattcaaagtgtcagtaaccctggtctgaatattaatcacgaatgaaattctcgatctatactgcgtacctgagccaacattgatcccgcctagaaagaccgggtggaatctgttccatcaacacacatacatccaatgtattaactagggatttgcatactcaacctcaaccccatgtgactctagaaccttacggttccttcgtagataaagcgtcgcatagtatgagtatggcgatactgtccaagcggcaataaacaattaggaatgaaatctcagggggtggagctgaaggcgtaccgcagtcaatgtaggcatcaatcttgccagacatgagtaattatagtcgatatgtttctattcaatctcagtataatcaatcaggctaccaacgaagaggagttgattatagcgtggaggtcggggccgaggtggagatggaccgaggctgcccgacgatgatgaggtgatcatcttatttcccaaattgtcatgaatcgtcaagttctatattgaattaaatccaagatatataattgccatatagattttattcttttctcaagatactgagattggggccgccccaatcaccattgcgttggtttggtggattttcagctcttcctttgactgctcgacagccaaaagcaaacgcgtggagcgaatgtgaagttctatcaagtcaatacaggatcctctcaattggaccatgaactgaccttgcaaaataacctcatatccatcccaagagtgatcatcccgatcatcttcatgtatgagcactggaaaagatggatcccacgcctttggccgcacgcgcattttcaacccaacggtcttgctcatatccacccacagtatatcgtcagaagtcattcgctctttttcaaagccaccttccccgtcggtctcggtagttttcttcgttctcctactttggccacgcaaccactctctccataaccgaataataccatcctcaatagtcgatgcactcaacagcaacgacgttcctggcttgacttgcactagattgaccaccacacataactgtgagaaattctcatatccacctaaagtgatctcacgtatcactgcatcctctgccttgtcttctcgacctccatatcagcccatgtaaaccccaccatatccaacagcagaagcacctacctgtggaaaaaccggacttcgaaccatttatgcttcgttctttttcttctttatcgctgcttacctctgggcgaaagcgcgagtatagccccgtcactctgcctggctggtgggtggcatcatgaccctcgctcagtccattcgtaccaaggtattgacagaagacgtggggctcggtgagttttgagctaggatggaagcattccagcagcagtttgaattccttgagtggtatgctaaggagcaggcggtagtgcaggattcttgaaaccagcgcatagaatcggtggttgactgatatgagtgggagaagtgcccgtgttgagaagtcggataggatttggatgaatacctagatatctctttaggaccgtatctcagagtatgttctgtgtacatacttcgttgggcagcgagtccaaggtcatcacgggtttagcggggttcatagtggttgattattgtgtcaattgagatgcaacctgggaagatagaccaatttatgctagttgtatactccaaggtgtaatacaacagaacagagacaacaagtgtatgtgagttgcactattgctgttggtcttgctgtacatcgacatagagacgataagggataagggataagtgacgtcatatcacgggaggcgggcatgaatttccttttccggctttttggtgtgccagtccactacagtccactaccgtccactgctaacccactgctaacccacatacaagcatcctatgtgggacacgacccggggattgtgatcttcacggttagttgcggtaccaaattgcctctttcggctcaatttgggtcaaacagtccccccgaacgtgcctggttccccgaaaactggggggatcccgatttctgtacgggtcaccgaggaaaaatgatgccaaggcgttgtatgctagtatatattgtttctaaaacttcgcgataccattagcacattaggcgagatccacgtgtggcctcctatacacaatacttggcctaacacattcattcctactccggacaccccgcctcctcattagaagtccaaccccgaccctttcaactgttttcgggcatttctctttccttttagtttcttcttctctcccctccaatattcttgttttcaacctacaaccatggacaacgtactcaacgacatctcccaccggagatataaccccctccgtggctcctctatcctggtctccccacaccgaaccaagcgtccctggcagtgagtattgttttcagaaagcgacatttcccaacaaatcagctaatcgtacaacaatccagaggagcacaggagagcccctccaagactaccctacctagttacgaccccaaatgctacctctgtcccgggaatgagcgcgcccagggcgataccaaccccaattatgagagcactttcgtattcgtgaacgactacagcgcagtgaaggaagaacaagcggcctataatccctcaaaccaggatggtacgcccaaccgcccagcgcatccgtaccacacgtatcaagctcacaaaccacagaactcgaatcgcgatttctcaaagccgagcccgtaaccggcaagtgctacgtgctcactttctcatccgcgcacaacctcaccctcgccgacctggcgcctcgagagatcatgcctgtgatcaacgcctggacagagatctacgcagcacacctgtccccggcctcgccgttagcgaagaacgcacccgtaacaacgctaccgcccacatccaccttaacaagcgcgacgaagccaaaggagcagtaccggtacatgcaaatcttcgaaaataagggcgaggcgatggggtgctcgaacccgcacccacatgggcaagtctggacaaccagctcaatgccggaagagcccgccgccgaaatgaatcagatgattaagtaccgccagcaacacggcggtagccacctgctggaggactatgcggcgctggagagccgcaaacaggagcgcgttgtgtttgagaacgaggcatttatagttgtctgtccatggtgggcgacgtggccgtttgagacgatgattatcagtcgcacgcacaaacgcgcactagtggatttgtccgaggccgataagatgctgcttgctgaggcgatcgccgagactacccgtcgctatgataatctcttcgagacgcacttcccttacagtatgggtattcaccaggctccgcttgatggtaccgaggaggagattgagacatcctacctgcacttgcatttctatccgcccctgctacgaagcgctaccgtgcgcaagttcttggttggctatgagcttatggcggagcctcaacgtgatattactcctgagcaagctgctgataagctgcgggcttgcagcggtgagttgtacaggaagaagatcgattcgtgaatgtctctgaattgaaaaagaaaaaaaaatgatgaattctggacgggtcataccagagttaaacctatttcatcctatatctatatgcaaattatattattttacccgccaaggcttttgtgccggatgtaagttatgttatacatagttgtggtccaacttgcaatgctcgttcctgtatagctatcggttccgtgttgcattgcattgaaccatcccctgaagccggatcatcccctcttccaaatcaggcacttaacccaggtacgctccgcgctgggtgaacatccaagccagcgaacccgacgcaacaatcaaaggattcaagaaccggcccttgagcgaggcattgccgaggacgagctcgccaacaaagtgagacagcgcaatgccgtacgtccacatgccaaggttgtacgcgacagggttcgtgatgttgtaagcagcagtcatacgaatgactgcagagaggaaggtccaggttccgaagatgcggccggagagcggagttgcgggaaccgtgccattgctgtagagtagagaggtgtaattcggtgcaatgtaggcttgcaggctgttaagagcggaaacgaccgagacctgtatagagagtggtggttagattgggggaatagaggcatcggtagctaggggttcggagtggcagtggtaatggggactggggtggacacgggtagaacttacgaaaaagagccatttgggcaggaggccctcggactgaggcagataggctaagtattggtccatttctgagcgtgagtttgtctttttgtttggtttgaagggagttggttgtttttcttgtgactcgaggagacgccgaggatgttccgggagtcttggcgtggatattcccaacaagcctcgcattagtttgctcaactttttctttttcttctgtcaactttttgctattcacatatcttcgctcattatggatatctcgaagcatattgaatgcctgtctcaatggccagcccatattgccccgggcttacctacttatggagcgctgtttctcctagcgactggtggactggtcattgcctgcaaggtctggacgttcgtgcgggtgcttctcagcctattcgtgcttccgggtaaaccggtatgaaatttgatattcagatcctgaaattaacgggatgaagctgactaggatgatcaaatagcttcgttcgttcggtccccccggtagctgggccgtggtgacaggcgcctcagacggcctgggcaaggaattcgcgctgcaattggccaagtcgaaattcaacgttgtgctcgtatcccgaacagcctcgaagctggcaaccctgtcagaggatatcagcaagcagttcccgcaggtgcagaccaagacactcgccatggatttctcacgcaacgccgatgccgactaccaggcgctgggcgaacttgtctccgatctggatgtgtccgtgctagtcaacaacgtcggcttgagccattctatccccgttccgttcgcccagacccccgccgcagagatggccgatatcgtgaccatcaactgcaccggcacgctgcgcgtcactcaacttgtcgttccgggcatgatacagcgccgccgcggtcttattctgactatgggctctttcggtggtctcctacctactccgttcctcgccacttactccggtagcaaggctttccttcagcactggtctactgctcttggcggcgagttggccccctacggaattgatgtggagcttgtccaggcctacctgattacctctgccatgtccaagatccgtcgtgcttcagcttctatccctacccctcgtgctttcgttcgctccgttctgtcgaagattggtcgtagtggtggttcgcctacctacgcttatagctcgtcaccatactggagccatggtattatggcctggttcctgacttgtgtttctgggactatgggcaagcttgttctcgggcagaacaagtctatgcacgagagcattcgcaagcgcgctctccgcaaggctgagcgtgagaatgctaagaagagcacttgagttgcttggcttggtttgctcgatttgctgttgttgtggagtataaggagcatactacgagtgatgcttcccttctcgggcgtgattaatttattattcgaaatgcatgatgggttcgacgaagtgtataaacagaaaaatgataatcagcgctcatgtgaaatttattgatacctaacggtcatcgtatcctataccaagaaaatgaaagctaaactccgtccccgatgatatcgtagaattcttatcgataagctcttatcaccccgtggacaatcatccatgacgaccagctagaaactgcgcatgttacaatcaaactaacctgacgcatataagtttatatccagactcatcatgtctcaatcaacccacttcattagtggcatcgaagacgcctcatacaaaaatcccacggaattaaaaacaccgatctgtgacaatcgcattcatctcctccttgccgcaaccggctcagtcgcgactatcaaaatagccaatatcatcagcgccctttccccgcatatccacaagctctcaataagagtaatcctcaccaccaaagccaagcaattcctcgccggccagtccgccgagcagcccaccgcctcgtccctcatttttctccctggcgtggaagccgtgtacgatgatgacgctgagtggggaccagagccctggcgccgaggcgttgatatcttgcacatatctctccgacgctgggcagatatccttgtcattgctcctctttccgcaaacacactagctaagctcgccaacggactaagcgataacctgttgacatcggtatgtcgggcgtgggataccgatggccaggttgacgggaaacgaaagcgaatagtagttgcgccggccatgaatacggctatgtggcggcacccagtgacggcccagcatatcggggtgctagaggaggagtggggggttaataaagacgagggcaggggagaggaaacaggttggttcgaggttcttcacccgcagtcgtcgaaggtcttagcttgtggggatgtggggagtggtgcgatgttggaatggactgagatagtgaaggttattgaagataggttagggttgggggatcagaactcatctcagagtagttaggatatgtctttgccattcctctatattcgcatttatcctccaggtagcatacttccggcgtagcggacattcccaagtcatcttcttggattatttatggcatctattagaatttttccacaccaagaaacctatatcagtaactttctctgacatcctcgataatctatcgtgggtttactccaatgatgttgggcatcagttcttatgcttggatgtatttttctagctcccgatgttcactgtttgccccctatgctcgtttagaatcttgcacaagacttcttgatcactttcccctttcaaatccaattgaacccactgtgtaaatttcacttgtgtcggctttacaatatcgtgaaaagagtggggtcccatctcacaaccaggtgagtgaaccaattctgagagctggaccatatattgaccccaaataggcgattgattggcgagttgtaagagaacatgcaaattggactgtataaggcggttaaagtcgggtatcagaaggtttgattgagattcgtgggagcccaatagataatgaggaagagagctgattaaaacataatcacgatggtgttttccgtcttggtgtcctgcttcctctcgatgtttttggtcccttggttggcttgtgatctcgcccttgctgtctgtataggccttgatcgccgatggtggcggaactgctggcaaccccactagttctgcggtatacacgatgataaacggaagaaaaaagtcactgaatgcatctccggttttagggagctcatatataggtgtgcagatacgtaagcgccgtcgatagtgatactggtaatgcaaagcaagtccacgccattcatcaaagtcatttagacaaggcgcagggttatccgataggagctgcgatggccgacacccattggagcataatgactcgaatgttcttgcttgattgacttcattaatgacaatctcgatattctggctgtctgttagatagacctttgctaacattcttagagctctggataacataccaatggacgaaatccccccccccaataacagctagcagcgtttactccccagagcgccgaagagattccggcgtctcctaatagttccacaagccttgcaatgtcatctatgcccgggccttgcacggatgtaaggaaatcattctcgagagtcatgatcgggcctttcaaacgtggcaacgtggcaagggggcgccagattgtacgggtgcgaaggtgcagaggtcggattattgaatgagaatgtaatatattgtcgttgaatatttcagactgctttcgacaccgctctatgataatgtaccctaaatgatactagttacatggttacagtcggaccgcaaaagtctccactaggatagaaggatgattacggagtactacggtctgtattgtccctatggttgttggctgacccccctgagtggttatactgtatgctcaatggtaactctatagtatttgaactaggatttttttcaagtacaaaagccacataatagtagtatcaaaatccttcaaaaatgtagtataaaagacaccgaaaaagacatacataatagtaatgaaagagaataaaccaaattgattcagtcagtaacagcacgttctataaaccctgcagttccttcggttgcaaacagatctaaagcaatacatccactatcaatcatgggccatgaccaggtccttttgtcctattacattaccatttgcaaatgcactgaaatgtatcacccgatcggtcattgacacagatacctggatcaaaagctccaagtaatagacggtatgtccggcgatggttcggtgaggaaacgaggcaaagtcaaggtgatcgaagtgacattgaatataatcgatgcaatgggcatctataatgaacttctctcagcattcccaatcactgcttataaagatatgcatatgttttgtggttgaaaacattggacttaccggagttttcaaaccgctctggtgcatctgagagattggactcataaatctccacgggtttggtaagaagatcatgctcccaatgaagtacctggatgctatgggtggactgaaatccctttgggtagttctggtccttttttttggaaacgatctgtcagatcgtacagggtggttgcggacacttggataatacacaccttgcgtaacacccaacaggggagcaaattcaccgatagtgcgctaggcccatatcccaggaattgcggttcattggggtgggagaaactttgaaacgatgcgaggccgtaatttcgccagcacttgtaggtcggaagagagtagccccgaaggccttggactgctgccccacgagcgatagcctcctccctttgatatacatgttagacttctcgctaactttgtagcatccaaaagatattttcgctcacgggttctcaggaataagcacggaaatgccgatgcgattgagggcagatcctaggctttcctgcagataggatgaggcgctgaatccgccaaccaagacaactttttatagaagatgataatgttagtttcataagtaccccacaaagcaaggataaaagagacgctcactttgatgacatgccgtccacacttctcatttgcagcagtgatctgggacagaatcaagtcgaaaatatttctcagaacaggctcgtataggtctcggacatcttcggcttgaagaacaacacgtcctcgtctttggctgggagactgggaattcaagttgaaatcaaagtgccaagactgactcgttgcaccattgaaatgagtcttgatcctttcaaactttttcatggcgcggctccctggtcggatctcgctcagggatagggaatcgaatcccccttcaactctagtggacagtagttcatagaatcgactgtcaatagcagtcccaccacagttagcccctgttgcgtattagtgctcagtccgtgttaattaaatcttgtgtataacttacccataacggtggtgatctgctcaagggagattgtcggatcaacgtctgtgacatagtatgttgtgatatcctaatcacagtgtaagattatgaagtttcaacggtataatcgggtatctcaccactgtaccacctccacagtcacagatcagaattccatcacgaggctaagggttgaatggataagatgtttagctaaacgaaccgaagacaccgagttgagaatttttacttaccttgaaactgacccttttgtcactgaaaacagcaagagctgcagcctctggttccggtatggtccacactcgatgttgaggcctttttccaaagccggctccttggattgcttgacgcatgaggttctgcgtgtcttcggaccagctggccggcgtcgtgaaccagaaatcgatcggcactccacttagacccagttcggcggagatatagctctggatgtgtgtgtagatctgagaaagataatcttgcacagtgtccacagcttccttctggtcaggcagctccagaatctttgaagcagtggcgatcttcaggaatgtatcgtcgaacttgctgctacttggaaagtttgcgtccaatagcagcttcgtccaggcatatgatcgtacatcttgcgtgacctcaaagccccagagaggggctcctccatcctgcatatatgaaattagggatggggttttggcctgaccaataatatctggaggccactgcttgataaaatcgatactgtcaatatctgcttgaccgcctgcatgagttgtaaggacatatgcgatttctatttcccaagagaattcgttagtgaaagaaatgaatggtttgttgaaggaaaatgtatttgcttacctgtgaaggtggtaccgtagtccacacccacaacaagcttgtacccatgcttagcttccatactgccttggaatcaagatggattctatctgtgttgcaagtgagcttggaaggacaggttggattgaaactcgacctagaagacccttagtgttatagatttgatcttccgtggctcattcccgatgggctagttccaacgatttccaacgatttccaaggtgatgtttctgtttcagtcgtcttttcaacatgaccatatgtttcattgcatgcaagcactgaagttgatgttaaacagaaccacctaattacaagattgaaggacatattagttctcttggtcatgtcattgggccgcagtttattctacctcaaagcatctggattagttccagagaagaataaagaaatgtgttgtgctaatctcccatggaggcactctgtagtctagtttcttctcattattcgcccctaatttcatctgacctcagaaactgaggtttctttctctaatgcagaatcccgtaaatattctacttctagaggaaaaggtttcagagaaaaataaagaaaaggtgtgtggttagccttacatagaggtattttggtcttttttgattcgttgcccctaattccatctaacctcaacacatagagtttctttatctctcatgtgggtttagtggatctggacggagtgccgtttccaataatttccaaagaagaataaagaaatatgtgtggcgagtcgcttatgtcggtattcgtgaaattcgaaaactcccggttccaggaagtaacaaagaaatgtgtgcgtggccatgtttctcccaaccagaaataaaatggaacattaccatgctgtctctgaaaattattcctcttcctttcttgtattcctcgcctctctctgattacattacttcttctgccatgggcgccactaagtcgaaacagaagaaacagaaatcccaggtaaagatgtgccccttttgttgctatatgtttggcctaacacactctcaaaggaagatactctatctgtggaacaccagcaaaagaaagcaaagatgtctacctgcagagatcccaagtatgactatccccgttatacacataaggaatacctgcgcgaaattcgtgagatgaaaaacctgatcgaggcaggtatgttgggctggcccgggccaggaaacaaagatgacatgtttcatacgctcacattcaccgtggatgtccaatcatttgtcattgaacacgcgaaagtcaagcctgaggatgtggaccatctctccgacacccagaaacagaccatcatcagccatctcgcgggatactgcgtgcaagagaagtgggaggtccttatggggctccttccagatctggttcgagagaaagtcctcgaggtatttctcgaaactctgatttacaaagacatctttgagaggtttttcgtgaactttttctggtacttcgacgggaaaatgtctccgacagacgaaggagatgaaacgttcaatgcacgtctgaagcatctgtatgaccaattctatgccagtatgtatacaacttcccttccgaaagagagatatgtttcgttgaccatgatctttcattgctacagccaacccacttatggcggcactatggagatccgaaacgaaccgccttgcaaactcgacggatatacgcaaggcatcggacacactacttggaacttaccatctagatcgccgccagtcattcatcggtcaatttgtggataatgctctctccagtgagcctatccggtggctacttaaagagacatcaagcacggaggaggcagaccgtcggcacaaggacctttgccgaatttaccatatggcaatggaaagcgcagcagaattgggaaatatacgaggccacattgacttggaaatgctggcgacgttgcctaggaccttcgcctccggtgagaggatgcagtcgcatgaatacaatttactacacgaggatagcaaccttctagatggtcaacggatcttgatggttgtttacccagggatagttcgcagatacatttgtgctcttgagaagtatgtcactgagtacagcaccgcagcatacgttgtggttgaggagcaagctcagtaatgatctcgatggaattggcttgtctgtcagtttgctttttttgtattgtttcttgttcaatatactccgcaccctcctcattatcacagtatgcgagttgataaaaatatttcaaaataaaaaagaatggcgccacccggaatcgaaccggggctaacacagatcattgttgtaccacaatgtgtcgtcataccactagaccatggcacctattagatggagatatggttctctttactgtatatgatctttactgtaattacccacaggggtagttgacgacttaagagataaacactatagttgtgcgtgctgtttccgtagcaattggcaatctcacgatacctatactagcttgccaggctaggctagcaggttgacttgcgtaatgtaagtaggttcatggatatattcatggtgtagaaagtaatgtatgcaacacttctgacagagaaatatatatctccaccccttgggaatatactctgctttgctactacgatgtatattcaattatttctacatgctctcatagctggtagaacaaacaatgttatggatcatattgttaggccaggtcaatatagttagtactgacagcatagttgtaagttagcgagtgacatctgtcgtatttcacgttcttgccgaagcacaagtgaatcgtgatccgcgtggcgtaacacgacaacaacctttaattattccatgttagcacaataatttgatcaccaaaaaagtactacggctgagtaaaggccaatcaataaataggtttaaccaaaaaaaaaaaagaaaaccaaaagccagacggggggctcgaacccccaacccccagattagaagtctgatgcgctgccaattgcgccagcccggcttggaatgtggaaagctctcaataatgtgatcgactttgcctcgcgtttcgagcctagttagcctactacattatcgaagagggggccactgcaacggaggcagtaggggtaccaacaagtcctgcctgcgaaacggggtgaaagcaaagtcattcattgggagtagtaggatgttagagagcagaacaccatggagtaactactagaatggaaggttgaagccaacctgaaggtgtcttcgttgctatctttgccttaggggtagttatccatggatcacatggccgcttagtcatcctgctctggaatcccccgctaatcgtgccaggcgcccaaaacacatacggtatacgcccacgcacagtaataactggttgacagccaaggactcctttctagtatcgaaatcctgtctgaatgtcatgaaagacggtccaaatgcgaccctctcggtagccattaaggtcctattcggtttaaactcggaaaacactctatatcgcgaagcgatatactaagctaagctgctcttaccagttcttatgtctcctataataagaataatcttccagcgcctaggctgaggtgtaacgagattatcaatctcctactccacaataatttgcgggacccggaacttctcgactcgaacataagtcggcatctcaaatgctgaataaaaatcttcattctggtgctcgtactcgatagcactcttcgcgcgatttgtaaagtgccttacgatgacatgttttgtgctttctttgtctactccgggcgcgaaagactcccttctttcaactgatctcccactttctgcttcctcttgtgctgccgatttaagtcgagatgcccagcaggagcccatcgagagggtaagtttggcgcaatctagtcccgactccttaagaagtgaaattgttaacaggatcgggattgttcccagaggctggaggcatagcccacggattcagactacaagcagcaacaatccatctgactcggatattcaacatgttctggtcagggattaagagactgtggcttgtcatgggagctggaatgaccgaacgtgctgcctactataccagcgtcgaactccagttgaaagaacatcggacttgatgattcatagaaaactatgtgcaaaattcagtttttgacaagttcaaaggggatgttgatatatcaatcccctatgattattgatttatatatgacccaaaagggtaattttcccattggactggctatcacggtctacgtctaacccctcttcacggcctctttgcgaccccaatcacacaacatggttgcgccccacgccgacggaaatcggggtgtgtgataagccacccaaggtgaagttgcctatttccatacttcgcgaaataggtctcgaaagcgtaggttatcgtcctagaataggccctcatatgggcacgttcgggagattgctgacgaggtagattgtggtgacgctccatccgagacaaggtcgtatgtggtgaccgtagtacctacaagaccgcagagcaatcgagtatcaaagcaggtcgttctggtattagatgccatggcgaggactgcaagaagcaggattttggaaagtaagatggcttgataacgatgggtgttcagcttaggggaagaaatgaacacaactatgagtgataacatggatggtcatgtgatcatgtgatcatgtggcagctatcactcgctgactttgcccaatctttttttgccatctctaggcatcctgcttcttcctcccttaattgcggagcgaagcgaagcaattaaaaaaaataaccctctcccccccgcctgggaaggggtcccccggaagggcccccggagggaacgcctcgaaaggagatcatgtgaccaggcgctctctctactgggtcgaaaaaaatagaaatccagtcggtgaaaaagtaatcgctgagaaacggcagaatagatccagccggcagaaaaaaaaaaagcaatcatctagtactctgtactctaaccctatccccttaacataagatcctaagatccttaagcagctcaaagatattaaatcaaaggagcatattattagagggggcgactcactctcctatttctgtctagttattaggtggtcaattactacgtccacgggtagccactcatataaaaggtacatataccccatattatgtactcaaccctttggctagttaaaggagaaataagagtatgaatcaagaataaatttatagttgaattgattggctaataaaaaaaatctcggatatcttatatatagaagtgacaaaatctctatagctctaaactattcttgttctggctctctcttttgctccccgtgtatcgtattccaccgacatccatatactccacattagggcgtgccaagctacaacatggctaccgtagtgggtcactcgaatgacgctgatcctggtatgtacctcttttctccgacggcgggggctcgattatttctagactagcaagacgtatcaaataaatctaaagctaaagaaggaacaagaacaaaagcaaagaaaaataaaattccgctcaaaacaaaccggtaagggtaatgttttgattggtgtcagccaggtcattgttcttcggctgtcagattgttgtccgccatccacaggattccgccccacccccatacccacccccatacccacccccatactgtaccctgctaagtttcttctactccactccttcggaccgatctcatgcccggcaccatggtccgtcacatgttttctctgcaatagttagttgatccgctatactaatccgctaccagagtgcttccgcccagaccccatcgcctctacccgcacctgagcccacccggttcaacaataaccctgtctgcttcgccacaatccggtcggtagaacgcaaactgaacattgatgaaccgggccttcgggctaaagttgccttcatgaccagcatccaaactctcgaggaagagacaatggttcggtcgctgcaccctgctctgaagcattgcgattgtgtttcagtagttgagggtggtccagtgaggaaacctctgtggctagtccatgcccgcggcgcccggaatatttacaacacacacgccgctggcagggaaatacatgtcctgccggcacaaactcttccacccgttacacccttgggtctgttgatgcgtcctgtcaatatcaagcgtatcaacccccggtcttttctcgaaccccagaaagtcaacttaattcgcgaagcctttccaggttccatcggagcacaaatactcttcactggttggctattgattttgtttccggagaagaagtcgctagaggcatgctgggataagggtgtcccggacgaggtcggtggtttacgggtcggatacatcatagcatcattccatgcgacagctaacatcgtcgagtccggtcgagcggttagcagtgcgccaggaattcttgctcagcaggcggcactcggcctacgagtacggctcccaggtggccaggaggcaatcacgacagtgacgcatgcgtttgtccgtcttgccgattccagaatgtcaaaaataaggaaacgtttcacggagtatatcttgacagcgaaagattacctcaagcggatgacaccaccgccgcggcagacaccacaggctgccattgtccacccgaaacaggttgcgaactcgccagttggtaaacaagtatggttgagcggaacagacacctgtgtatctataatctttcctttggtgtgccagggtacataatgtgaacataactaacctcactagattggcactattacagtaacttacgaccgatgtacgcaccaccgtatgattccatatccctatggatttcaacacgatttgagtttggtcactgggccgaacctcccccagctcacgaatccccccaacaccccccgggtgacagaatggggtccatatgaagcggcgcttcaaggccggccagtttttgtgcaccgctacaatattgcaaccggaagcttatttacttaccaaggccatggagtaacaacacaagcccagcagtgtattatccatgggacccagtacagctgggatgcacgggcgtttggtacagctttgctatggaggactcttcgagacaccgatagcgttcaagggacatcaagcagtgtcctatgcttaggcgaaccacagcacaagacagctagagctcttctcttccagaacttcgaggcacccctaacggcgagtgaaagtgtgcatatcgatgagaacgaggagggccctgtctttaaaggggggtttcttttgcccgaagagatccgtcgctcacatatcattaccgtgggagaaatatatccagaagacttccgtaccccgcagaaaagttctagctcggaggtccctacgcaggaatatggtatgactgtgtaggcatgtttgagaggagagctgttccggtagatagggaaaggtttgctagcggagagtacgaatatgggcggaaggatagagattgacttgcttgaggacatcattatcatcatcatgatcctttacttttccatcggattcaatggtatattccaaagggtatttaaagctatatatgtattactgtcgtttttgcgcaaatctaaaccttgcatgttgatatatctagtgtccgaggtgcccagaaagagaacttcgatgcattaatggaataaatttcgtttagtctcctgggttgaatattgtacctggtctcccccgaatccataggcaaggcatcgagtacaagtagtgcttagctcagctcgatcttcactttctcctgccacgttaattgtgtggctggctgtgataagaaagattcgtattctgggtcttgctttgataggcccgatctctaagttgtttcgttctgtgcgtagctacaggtaaaaatctacttgcggtgaatggcgcatgttgagcatcctaggttggttatcccttgagcatcgcttggtcttgtgtaaaacgtccacaccgcaatttttgagcagcttggtatagatgttacgttatggcttcctgaagcatactgaagtaagaggtgctcttgaaccacagtcgtaaactaatgtagatcacagatgatctgggttagactatgatatttgagggctttcggcgcctttataccttacattcctcatccatacaagtcaagtgggcgccaataatatatttaattagattaagaaactcgagctacctactgtatatagaatatatgtccctgggctcacacccaaaaatttgcggctggatcctttatgtaacagcatacatgcaacaagaattcaggccacgtaattcgaataatgcgcatgatctgttttttttttttttttcgtaaccgaatgcggatctagaaacaagcttccacccaataaaattccctccaaccgaacccccacgcagatgatatccttcacactgctagatctgatacaagcgggatgccaggtgggccgatcattgagatctattgagtagtagtgcatatctaatctatttagaaaccaaactacttggcttccatgtctctcttaggagctgtccctcgatgaaagtagttctagttttcccgcagcttgctcagccagccacggtgttcatataattgcatagcagccactggtatccaactcactctagtgcctcactttgacctttataggcagagagccttcgcacaaagacgaacataatatatagttaatcagattacatgaactaatcgggcaatgaatcaaactccttaactaatgatcttcatcgtacttaccaaccgcggtagccaataccagacatggctagtcagatagcacagggtggcaagttggatcacaaaatattagtcacacttcaccgatctctcatgcgagtctggaccagcccaacctccgttttgcttttcagcatcgacttttcgttctgaaactagattcggatccaggccgacatctcttgagattggtgaattgccacaggcctctaacattgcggtgagtttctgtctgactctgtattatgttttgaaagccggctgtagacaaggtggcaggtgatgggcaatgccagccgtgcatgctctaggacatgagatattgttcgcatagtccgcatgcattcagcatgtagtggtacatcctatcttactgtgctcttttaatgatttattggtagcatttaacacatcatataaacaaatgactaagcgagccttttggctaatataaaagtcacatcggtccctcagcaaaagcatcattgaaacaataattgtcccagcctccgaaccccttgaattactttcattgcagtgtgcctcctcgtttgccaggattccaacaaagactcggaaattaaaatgtacaagcagtggatcacgattcatcttatcaatagcatgcattcgggccacgtgtatgtcaagcatgccatcctggaatagtgagtaaatagtcgctttacagcgcttgtcaaattatattatcatcttctctgacagaatataagtggccgattccaccggaatggagacaggaatgatgagatttcgactgaaatgatcgaccaaacccaagtggctccaggtagttccgtcaatataaactcatgcggtaacccggccgaagcttcgggaacggagggaagcattgagttgtatgacggctataccaggattgccaaagtccattggctctgccacctgggtaaccattccagtgaatttggcatctcagagctgaacgaccattactggatcaagtctggagcatgggacgcggactcggcaattggcttccttgatgttcaagttggaaggaaggactgaagcaatccgcttactcggtcagacaaagggaaaggtatattctctttttcagtgccatctcagctggtatattttgtgttagggctagccactagcgtatcctgaaatggaggtttcgaactagagtggaaatccccaagatggctcatgtaattgagtagactaatcgctaaggttctaatcccatgtgcgcggtgtgtgtataccctggcgcttacttagcgagtacgtcgagccatacaggccaggccagttgtgcaggtgaccctcggggccgtaacactctcccaagtccccaaagctgtcctgtttgcaaaatgtcgctttcttcgtgggtcgatttttggaaatgcgttggtgttcatgctgagagttcttcgccatcatctcaactggaccaaagccctagctctgttgaacgcaacatggaagggtcttcacgtatcgacctaagatatagtgacggaaaaacggtggtaaggcgagtgtatatgtggcagaaaaatctcaataaattctctaactctctaaaactgacaatagtcctaaaacatgacaatctgatggacaacttagtaatcaaaacaaacaaaacaaaagaaagggtgtttttcgggcgaaaaaccagcctgttcctaacgtaaaggaattccaaaaagatgcagcagatgtaatctgatcatccaaggtgtgatcagggtcgccacattctcactctcagtcgattagatgcgtccctgctctctgaggatccagactgggacgacgtgctgcactttccaatcatcgactgaattgaggccatcatgagcgaggccatgtgagctgccattaaagaagatggatcctccgtggtagagttcttcggttcgatggcttttcgggggaccgctataattttcgaaaccggatgcgtttcatccaagcaagatgcaccatttcggagacagaaattgcagacatcatagtccccaccctggcaaagctcacagtggtaaaactcgtccccactgcagatgtttacccggcaaatgtcacagaatttgggcgaggccatttgatggacagtctctggtaccggcaagtcatgatccacctcatccgggtctaatagaccacagatgtgtggttggcttcgctcggaagcttccgagaaggcagtgcgcccaaagcgatcttggaggtgtttattcacattggtgattttcaacaaaatctgagtggcctctaatgcccctgatgctgccactgtcatcagtggagtacgaccatacacggtggctaggttcggattggcaccgttgcaagccaggatatcgatcatatctgtctttcttttcatttgggctggggagggtgacgagccacctcttctaagagaggctaggaagaggggtgtctcgccgagatcgttttgtgtgtccgggtttgcgccgtggcgtaaaaatattctcgcgtaatcctcatttggggcaaaggcggctctggccagacatgtccttccattttcatctttgagatcaatgttttgaccatgagagatgagcagtctcagcatagcctccatatcattcccaactgtctcatcaccgtcaaagtcagacttcccgtcaacctggactgtggacaccacagaaaagatgtcattcttgttgaatgccttttgcttgagattatatgaggatcgcctgactgttaaactgcttttgaccctcttagtgaggaaaggtctgatcaaccaaaagagagaggattggttcaaattgttctcgttgatcagcctggcttctcgcttcaggagcatgtttgcaattgcctcgtaattctgagctacggcccaggaaagagcactttcaccggccttattcgcgaaatttggatttgccccatacttcagcagcagctcaaccatgaaatcgtcaccgttgagagtggagaacaacaaaggtgttcggctgttctgttcaaggcagttgggatttgcgcctgctcgcagcaacaattcaacggctggtgtattcccaagttgcacagcccacaagagcggagtccggcctgtattgtcttcagcttccgtttgacaccctttctgtagaaggagttccacaaggtcattgtgcccttcaatggacgccaaagtcaagctggtttttcccgtttcatcgcgatgatggaggtcaaagcctgcatcgatgagatgatgacacaggttaattcgcccacatcttgaagacacaagcagagcaaaatccccaacacgagttgttgacgtgaggtaagacagcgaatggcgttgaagaactgagataatagccaggtttcccatctccactgccgacaaaaacgctagctttccaacggttccgcgttctccaggcttgatattctgaacatatacctggaggtccgacttataaatgaggtcagctaccttgttgtgtttgaaatcagctgccttgtacaacagaggctccgaagaaggagcgtccatatcatcaagccctagatcaaccaaccgctgggaaagatcagtgcagcccgcacgtacagaccagaccagtggagtcactagaccatctttccaagaacgtctcgccgagcaagaatttttccactttgaatatccctccccatttctccccgaaatatgctcacaaaacaaagcaaagagatcttttgaaagtctcttggacttggaccaagattcttggacttgttggaacttttctgggtccgattccgaccattgactcaccaagtccccgtctccaactgcgtcaaataagatatgagggtatcctaaatcgggagttggattgggatcagccccatttgctataagcaattcaatgatggcggcatattccatgcaagactctttgtcagcacaaaggaatgtagctgcctgaagtaatggcgtctctcttaatttgttcctcgggtccgcgtgagccccaccgttcagtaaaaggtggaccgacgacagagatcctgctctggctgcgaagaaaagcggagtctcttccaactcattcctttgattcggatcacttcctcttgtgattagatcggctgcaagtgagttggatgggcattggacggcataaaagagagctgtgtttccaacaatgttttggctgtcgagcttagcaccttcgctcaacaaaagtcttgatatctggatgcgcctcgcttttatggcaaagaacaacggtgtttcgtttactttgtttgacaaattgacgtcggcaccacgctcaagaagatatctcacaacctcttcatgatcgttccctgcggcactgcacagagggggatcctccagggagccgcttggttggttggggtctgcccctttgagtatgagagcttgaacaattttcagatatccctttgagactgcccggtccaatggagtctcaaggtcccacgtgattgccctcagatttgggtcagcgcctttcatcaacagcgcatttaccaactcttcatcaccactgcgaacggaatatatcaaagggttgccaccagtctgatcctgagcattgacatcaatgtctttgctcagaagcagtctcgctgtgcttttttcacccttgaaaactgctttgatgaaaggcgttcgtccgctcgtatttggcaagtcaggatcagctccatgattgagcaacagttgaaccatctcgtagttcgcatcagacactgctctaaaaaccagctccatgttcttgttagcgtattcgctgatagtgccatcctttggcagaagtaagcgaactgcttctaggtttcccgaagatatagccagctctagcggactatcctctctgaaccaaccacccctgatatgattgtattcaggattggtcccctggtcaaggaggagcttcatgattgagacatgaccctttccagcagcttccttaagtgcccgctgcttctgttcttgtccaacttcggtaccggcggaaccggatagcaaatacctaacatcggcttcatgcccttcaccagcagcttcctccagtgcatcatcttttgaaatcacaccatggctcatttcaggcccgatgagcttgacggtgctctcgtgacctgcccgtgcagcgtaggtcaaaggggtgtcccccttcgagtctttcgcattgacttcagccccgttttgaagtaggatttgaagccattcagtgagaccaaagtatgcgcaaacatgggctgccgttatcctgcatgtactgtacttcaagatgtttgatgaatccaggggtttgccccgcttgattggaggccccttcatgctttgacaagcagcagaaaagcatccgatgctggctaaaaactgaagcgcaacattttttgcatcatcgctatttgaatttcgcgcatggtctccccagtgtttcgtgcaatacatgtacaagggatatcgctcatgccgatccatgtatgattctgggttactgcagcggccgaaggaaaagggctcaaatgacatgtaagtgagacagtttagcgctacttgactctcggggtccttcaaaataccttctgtctgaagaaactcatgtgtggtgtaatgaatgaggcgcacaacatcggttgctcgatcccagactattagtcccgcacacagattatgaagaatatcaatatccagcagaagctcttcatctaggtcagactgcccgctttcagtcactaatgcatgctgcaattcgacggagctgagtgcttgtttgctgtgggcgagccaagacagagccttccttgccaaatcgcgaatttcatttgcctgtcgatcaatgtccgacatcgctcgtacataagtcggggttaaaccgtcctgacctctgggtagagcctcgagggaacgcttgagatggcggatcgttggcatcttcatcaggtactctgtatgaagctgagcaagcagaaacattccgtctgcagcttgaagcaccatggattggatatgttcttcgagatatacttttccggcgacactgaccacaaaaattggcaacttccgattcaagtataggaggatatcggcttcgtgcgcccgaatttccttctgtattgagccaggaaattttgacgaaacattcgtgttgttgaaccgtgaagtcatcagcaaattgattggaatgtccctttggatatcagatagctcagaaagcagtgtttggtggctctcgtaatccgagacataatattcgtccactgcatcaaggacaatgaacacacggttgtactgcctcagacattggcaaagcaccaccaacagctgtttgactgatggacgagagcccgcagtggcatgttctttgtggaggcgtttgatgttgtctgggatgcttctctgcttggcagtgacctgccgtagcagcacctgtagcatattctgaacagcctgttcagattttggctgatagctgcagtagatatatgcaacaacagactttggatcttgcttcgtcagagattgaagatgctcaatgatggtggcagccatgaccgtcttcccagcgcccgggataccagggcagaacaaagtttgaccagcgctttgaagccaattcttcatttcagcggtctcaagaaaccacaggcatgttccgtctattctttgggccagtctatcattctgcacatcgttgaagttgtgtggggatagccagtcaaggatggccatttgatgctcttcaacaacagccgtattgaggacagaaacactttctttgattgatgatacgtcctcactaactacacatgtcggagggtagatcagccacttgaactaccttggcatcacgaccagacaacggacaggcttcgatactgaccagaattcaagattttttgcgcagtatcctctgcttcaacctctttaggcgtcacaaattgcagcagttctttggcacaagccgatgcagctactgcagcgtagttgtgccaggtgtcgttcttgtgggaatctgcatagtcggatattccgcgaataacaaggcagggaaaggcgttcatcaacccagccgcttccatttccaagcaaatggcctgatgtgtttttccaatttcggtccgtgttggtgcgtgcttgacaaccgcactgcctgtagcaatggttccataatgaatcaccgggctggtatcatgtctttcccattcctggcgatctatctcatagtctttgtcgcattccgcacatgttcttccaccaacgtgagggtattcggcgtgaaacagcctatcagaatcttgattcggcctgacccaaccacctttttttctcaacttcgggtatttggtgagtgctttctcaatgaaagatgcaacctgactttcgttcaacatatgctcagtctccagccgggttaaggctgtcctcagagacctcggcggctgattcaacgggtacctggcctggaatgagccgtctccgagcctcctgccgaagtcatagacaacgactccaccattttctttactggaactgacaacaacatctccaagacgcacatcttggacctcatcgagctcgtagtcagggatccctgctccaatgcctaccatcaagccaaaacgaatgccaggaaaggtaaaaagcatgtccttggcaaccgcggcggcggagctggagccaatctcgttctttggcaaacatgtgatgacaacattaaattttcccacggctcccagcaaataaatgttgtcatctgcctgcttcggtggtgtctgtgggccttcgtgctcctcgtccaacatagccttggctgcactcagctcgattgggagcgcacacacccatccgactgtgtatctttcattcggcaagctagtcgacatgatcgtttcaattgtcttgatgagatgtaaatgattttaagatctcagttctaataacaagtacgactcgagaatatgaaatgaggtgccagatatccgggatccaggggcacataaaagagcaaaggtttacggcccaaggcatgcaactcagccgcatctttcccgtacaaagtacggagtatccctatgtaaacctgttttttgcccaagttgcgacacccgggcaaagatcagcacacgctaagaacttggctgcatcagatctgcaaacccgggcgctcgtgccaatcgtgctagggagtacggagtagtagggaccaccttctcagtttcatatttacgcatctgccgccgagtagcaatatgacacagaatagaggataacccgtctagcagtaagacttctgagttgggagaatatatgatcacatcagcttctggtcaccggccatcgagcgacaatcagttttatatcagcaacagttatgtgggcaaggttgattatgtactcaaaagcccatagtcccatatccatccgatatgcagtaactcgcgacacaagcaagccctggacgcggctggtcctcggacggggactgtcccaggaataggaaccgcctcaggacaaccggggtcgcaagaacactcgacggaactcacatgaccaaacatatcccatgatagggttccccagacgcgcccagggccagtgcatggtataaagttttcaggaggtaaccggtaccttgtaacaaacattggaccggtcacgcttcagagcattgctccagaccaacaggacgggagctaacattgtttgcaaattctcttcgtcagagagcagtggatatgctatggagaaatgcctttctttcgactaccgtcggacttcgagtcattatctgttgatgtgcaaggcgatcatgttgctattggattccaaaatggtcaagttttgtgctttgacattgatcgacgtatcctgcagtcagtattagggtacgctctatggacaatcgagcaggccacgtagatacatagaaatccggtaaagataagggtccaggcacgacagtcaggcagattcgctgctaagagtcctgtactgtcagatgccatttttcagcacccacagaccttttgtatatcctttcaagtcctagtcaggatctcgtccgtcgtctttattgtttctctttccaacgttcctaccatcgccaaatgtgactgcacattagagtatgatacaacatatgtattgctatattttatatcatgactaacaatgccgaaaagagctaaagaatcgcacctaacgccaacacgctttgctagaccagttctagaatgggaatcacttccttcccattttcagcctagtcacgaatgttttctacgaataattccgggttccgatccttgtagatgtggtcaaggtcaaacccatctgacagcgttacgtcacagggatcagtggctctagatggcctatcaataagttgccgcccctcaaaaagttggcggccgtaaacaccgtgctagtcatatactaagcgagatcctattaatgtcgtgccacaatcctgctagttgtgaatcgcctagcaaacatgttgatactttggtctggtttaatcatcccctctacagccatctattggaatgccgcagttttcgagttgagagatgatgacgtgggtgctgcggggctctgcgagtaaatcgcaactcgctgaatggatggtgagttgaggggtaatgttaaatgaaattatataaaagggtagttaggcgcagttatttcttatgtgctaagaattgtcatttcgctacttccttgttttcaaaatttataaaccatctatttgtgaatttgctgaagaaaacctattgatcagaatgcctgttatagccatcaactcgtacgtgatgttacaaacagtttcccccctcagaccatattgctcagtgctaatatttccaatattgtaggtacgacgaattcaatcaaatcatcaacagcgggaagcccgttgtaatcgacttctgggcaacatggtgtgggccttgccgaactatatcgcctattttcgagaaaatgtcggagttggcggagttcaacaatctcgaattttacaaagttgatgccgatgaacaagaacgaattgctcaggaggtcggcgtacgttcaatgccaaccttctatttatttaaagacgggtttaagattaaagaacatgttggggccaacccgaatggtttggaagggcttcttcaggtagccgcttctggagcatgaaaaatggaaggcaggattgcccccattgctggaaggcggggaagtagtgaaagatacctatctttagagaattaactctttgttttccgcccataacattttcccatcccataataataataataatgacttatatctaggtgacggaattgtggattcagtgtggccgccctcttgctgcctatagctctttagctaacaaaagcgagctagttccgatgattgtttcggtacaatagttcttagactttagcactcaaaacgaccgccctcatctacataatatcttagattttcgagcagaggggcctagttcgatctgacttactgtaccacagtatgaattttagctatagtatcgcgcaaaaatgaacataaaaaataattcaggtattagtacagctgcaccacacgctaaaagtggtgcagtggttcattaaccataaaaacagtcttagcaaagcctacaaaatgttaactcgttcttggcctagatcttgtcaatatttgactattttggttcactctgtggaggttcagattgtctacctattttaggtggcattccattgtagcgatactgtaatagaactcgtccgtcccttaagggtctatgtccacttggctggaaaataaatcaccatatatcacacagtgtatcgactatgggcccacgccggaattcacatagttgagatgtcgatggtgaggaggtggattactgggaacgtcgaaaataatatctcgcgtggttgacaggcgagggggtagttcgctaatccaaggagttcaaagagatgacctcgagattttaaagggatctacccatagaaatcattattcacgacttacacatatactgtgagggagcatgttcatagcttacataagctctaggtagctacacctagagcgtagacaacatcaataataagcatctttaccaccactaagcattttccataacagattggtagcatatcctgttaaaccagaggtccttctggttaggcacacctttcagctattgaatttcaagtgtccctctcgcccctaggtcgctagtagcgaagggaatcctaagcttcatcacttctatcaaccaagtacccactttcaattagcccaactaattaccttatcattccaatttcaccctacgtcaaacgtagcactaccttatcaagtatttagtcttaacctttgaattccgaccacatcgttaccactagaggcagacaatttttttttaaaaagcctgcgttagtacagtcctagcaaccataggacccgagccctaccttcgattagggtcgcgagtactcgcggtcacaggacccgagccctactttctcttagggtcataagacccacaatacctagttacctgcccaagtcccccacactcttcctaatcaccaatcagggtaatatccgatacctcttactaagagacagctctgtacctatatccttatcaggtaccagcttcttatatactttaataaatacaatagtataagcgaagagctttagaccttagaacttaatcataagatcctctttatcatatatacttataatataccctacctacctaaggaaaacccctacctaatagattagctacttcgcaaagaacttataagggtaataaaagagttctatttactagttataaggatactaacctataagccctaccgctaaatctaagataaggatcgtctattatagttctagctactaaggataagtctaataatactaacgctaatctttctatagtctagagatctcttagttagcctaagcgatctactgagcgagtattcgcgagctagtaatgtaggtatagactatagcctcctacctcttagtactctaagtcttatataggagtcctatctagaagccctagagggactgcagcttatcgccctattaagggaagagttaagtaatatcatcgagtaagctatagtatattcttactaggcctataatatataagcgatagttaataaggttattatagcttactataaggaaatctagggactagtaggctaagatagctaggatactatatatagttctagctattagaagatagataatatcggctactttactctagatctaacgttagatacctatatctatactataaggggaagtatatactatactaatatatatactttcctaaattagctctaggccttagtttccttaaaatctaaagaggttatctaggctaacttacctttatacctttaggaggtagctatataatagtatactgctgagttattagataaagagtattaagacttaagtatatactccctataacttagctagtatattatactcgagagacgctttaagctatatataatagaggcgattgctagagtaatagttcctaccttagtctactcctagtataatatccgcgcgggatatagtattatagaataggcctagaatatacttcgcgatatataagctgtagaaatcactaggactataatactcctatatctagtatagatatatattaagccgatactctaatataatatatataaacccagcctagtaataataatcttacagtttatagtagatctcgatttatattatagttagtagtataagatatcgcaatgtacctaggtatagtagtatctaatatagccttaatactaccctagatactaaggttaggcccccttatataacccttatctagtatacagctatagtattagatacagttacctaagtctaggataccgactccctttctacccctataatataatacctataataactaatactccctagcctatatagaattaagattagaattgtgactaataatagctgtagtagaactaaaggactctatatacacttctactaagtggcccctaggtatagtgtgtaccttatatactataatagtattaatagtagcagctaaataatcgtactaactaggtaggttagcttttactagctaataagctatagaatcaagtaggctactcagctactggatatatagcgcgttaactgcgatagaattatcctatagctatatattaggtcgattaggctgctgctagggaatataggtagttagatactaatcttactaatatagctttctataatagcgactatatatataagcccctaggtatatattatataggcggagaggataccagttatacagaataccttcctaaggaggatctataagtatcctagtaagctccccctttttaggaagagtaggacgactaactatattattctattatagaggacgttataccttctactacttatctatattattataccctatttaaatcgaataataagctatatactcatttaaaggagtatattatataatatatagctactacagttaataactcgatagtggtatactatacgactaatctagcaggtatagaagtagatactatcctagctaacttacctataataaagttagataggccctatattacctaactaggtatagtatataagacttagcgctatatattagcagttattagactaacgatatagtagaagctacttattatatatcttaataccggctatataataataattattaatatagatcttataaagtctctaggtctatccctatagaaatatactctaatactagttataggtattaggtcgtactacctattattagcctttatcttatttaatatattttttagaggattagataatatagtatatatttatattaaagtatacttagtcaataatcttaaagttaaactacttattagtatagatattataggatataaaggtttccgtttagattttaatactaagatagttaagattctatcttatataggtctaacggtacctatctctatatatactaagccctattatactgtatagtaggtagtctatatagtagcttaggttaccattcccctatagtctattatatatatccctatataggtataggcgttattcctagaggactaggattatatatttaagggttattatagctataccgctttctattcctaccttatagcggtaaattttacttaggtctaggctattaataatataggctagtaagtatcccttcgccgttaggattagattaggatattatataaagtagatataccgatagcctatatagttaaactagaagctatagagctagaacactctcctattataactaatattagatatactaacgagggtctatattatatataggataacggcgtttagcttattaacggtattaccctctaggctagcttagagctatcctaggcctagtagcttatagagctccttatatcttataatatctagggtaaatatctaggtattattaatatccctaaggacagataaataactattccccttaagcctagctaggaagtatagcttcctaagtcgaaaatctacctagttagccctaaggattataagataattaacgctgctttttaactattatataactaagggaagataagttatataataggatatatagctacaggtttccctatctttattatatagtgtacgatttaccggcctaggcgtaagcctaagcgtaagggtcgcgctatagtagacctatggctactaaataaggaagtcatatataacgtttatcctattctaactatagataatattttacttctaatatagggcaaaaagtttattactatcttagatatatctaagtttttttattaatagagtatctgatataagtatcgcggtaggatatatattatctcttattaggactaggagatattttatattataatcataggattctataatagtataccctatatctagtaatagatagacctactcctaaaagagtttattaagttctactatacctaccttaatgatcttattactatttctaatacctttaataaatatatcgaatacttaacccttatccttagtattctcgaaaagtatagggtagctttagaacctaaaaaggtatatattacctttctagaggtctcccttttaggctaatagatagatatattagggataataatactagaggataaaattaaagctatcgctagcctagagtttccttagatactatagtagctagagatataccttagtataaccagtaccttatatcagtatattccttactatataaagaaatctaaaccactctagatctataagacagagctcttatatagaagcctagttaagggccgtctgtattaagagtagtctatatatactaagtatatatatctaatagactataaattagtgttatttaatactatataggtagtcttttaagacctttagtagctagtacactaggactgtagttataggctctactttaatattaataccttataggagggtagccacagcgctatggttttctaccttaaatatagctataactatactaatttaaaggcaactcctccttctatagctatagagccagttatatttttaagctatctattaatactagtagagaagtagtactaggtaacagagttagaggtttcctatattatataggttatttataagatctattatataattaaggtagcgctaaaggaccttactccggttatatataccgactatattataacaattaacctcactatatcgctatcctctgtgttactagactatataaacctatacctagtatatactttataatacctatagcagttttatctacttatctactataaagctaataaactaaattatattatagatactcttttgtatctactagctatagataaagtagaactataagaggataataaccttaaggccctatatattcattctatatctaatatagcgctacctagtatagggcctatataggacatccctaataaagtatatactttccttatatcctatatacagctctccgaagaatttaaaggatatatacgaactatatattaagaggatctaaaatagagccttatttttagtaaattctagcgactcgtagaggatcctaacctaattaaaccatatctaccctatactactaacgatagtttactatattctatataaacagatagcgaccactagctatatattcctaatctaattaaaaacaagattttcgagatagcatatagtaaaagataccttagcttctactatacctagtaaaagatataaggctttattatatataaaggagtaaagaacctctgtacttatatcaatcaatacgataagtataagaaaaacactatatactattataagccttacagttcgctctagctaatacttatactacctattcctttttatatacttactattaattttattataggtttactataaataaagaaagggtttaatactatagctatctatatatataaatctacaaaacacattagtttaacgcctaggaagaaaacctagaaagggtataactaggtaactataatactataagatctctagaaaggtaactagggagtccctattatatagatttctaactataataagtgatttatcgaaggcttctagaaaggtctctttactaccttatatataaagctcctatataccgtagtatactatctatctactaatagctaatctaagcggttaaactagactatagaaatctagctttactattagtagaacctatatcaggataccaattaggataaggggctcacgctaatataggtatcgctaaatatatctaaaaatatagctattaataagtcgctatataagttaatatttagtattaacctataaatactatagaacctcctttattaggtatttatcagatcccccctaactacctagtaagacgccgataagtatactaagtactctgtaatagtaataaagtagtagtataataggtagtatatacctattttctttaaaaaaggtaagtatatttacttataccttatctaaggagtagagcctagatatatcctactatcctacagtattatgtaaaaactgatatagtattacattaaatactacgttattaaatatataggataccttatatactagctacagttcctacctaagttagcgggcgcttatccagttatatctttataatatctagagtgtatacctactaaaggggagatatctatagaacctctatcgaccattaatctatatttccctagagatatagattagaccgatattaatactattcttaatatacagtaccgcggctatagtagggatcagtgaaagtaatacctagtttagtagtctaggcttagaaataaatacctagaatagttagataaggataacctcgttagagtagaggagaaagtcctagagtatctctaagatatcctatattatatataggattctattaattaaccataacctagaaggaatctctctatatttatatttatttattatactacccctctatctaccactagtaccctattcgtttactcttttattatcttatttctatttctactacttcgctagtatctactaccttacttatcttttagttccttaactattttaattatctagtacctctcagttttcttccttctatatcccttagcttactatttaatatactacttattgtcctacccttatcttattaatatacctatctagagatctattagttataggcgttatccttaagctttatagggatatacttatacctattatactatagtaagtgccctaaataagaacgctatagtatctaaccctactaatactaaggataactctctacctactactaagtataatactagcttactagcagataatattatagataatagtaacctaggcttacttaaggaagcgcttatcctacctaaagatagatagactatagataatctaaggctaagattatctcctatactaagaactaatattatacaatatactttatataccgaataaactttcgtgcttatactctactacttctataataagtctaccctatatacactatattaggatagggcgaatatattatacctaatcgatagctaatataatagtaagagacctagccctttattagataggaagattaatatacctactatagcgatatggtttatcttctactttttaatttataactattaggataaccttaaatataaagcctatcttaccttatcttacgtttaactgatagataagggcgtcttctactacctatatataataatactatactagagaaattcctacttttagacagactttaaccaatatagggatatttatacctcgcgtatacctctagaccccctaatgattatataggctaatagattaccctagttcctagtttataaagtattttatatcctctataggaactagagccctatatcatatcttataggaaggaagtaccgctctaagactacagagttttatattagtatagtactagccctacctactactgtcctagccagccttaaagattctctactataactaactctctagacatttaattcagcgacttacctagatcctaaggatataaatggttcccttaacctcacttatatcgccactatcagctatagctaaaataagaccccttaccgcttttatataaaccaggaccctaaggggtatatattagtctactaattgaaggctaaggaggacttagcgttctactagctctaagatctaactagttatcataagtatatctataatataacccacaactttccttctatatcctttcctaaagccaagctatataatatagcttagtaggttattcctaaagctatatttgacgatagctttacctataggaagccctttctaggcgttaacatacccgtgtaagataccggcactctatagctagtcctatagacagtaatatatagtattattaactctttcaggaataaaaatatccgctaatataagcgcgtataccgagagaaggagcgctatactaattctatatctaatatacacattccgtcctaggaaagggtcgctatatcgaagcccctctctagcctactacaaaatatagagctacgcttccgtatcagttaggttaacagtaccctagacatcgtcagtcctattatatccctcctactagtagtagaggccttatttcagaacatcggtagctctaggaggctggaacgtattgcctccctaggccataccggcctcatcgacttccgcgcgcgtttcgtcgagggagacccccgcgttacctgcgctatatataaggggctcagcacctcactgaacgctatccgcgacaccatagcatttactaagggcctactgctagttaaccgatacattaagacggtaaaggatgacgccgtaaggcttaaggtcgaagccatagcatccatgatacgacttctaccagaaactcctttacaggaagggtcacttgacttctaactgaggctgccgaggacggtagcaccctttccgaagggggcacttgtgagggagcatgttcatagcttacataagctctaggtggctacacctagagcgtagacaacatcaataataagcatctttactaccactaagcattttccataatatatacagagtagtgcgcgcttcccggacaagatccgaaaagcaatgcgtctgcattctagctatgatggctactccttacagttacgatatatgaagtcttatatccttgagagtatgttagttaaaatactgtaacttataacttaggtaattgaataggcataactaactagttaactattatgtctccgagtctacccctaatatgttatattatttcttggcattacggtttaaggaacaatcgaagagtgtaggtggtaacactagtttcgagacgtactgtacttgatattctgttatgccattctgaagcagtctaggagtttgcggtagctgttgtaataggacttctaggtcattctcggagtgatatagtagtcggggataaggctaagtccacaatccagagcttaacgcagacgtgccaacgtacgttcctggagcgggggcacctttaacattcgtctgtttggcctgtttgcatgactaaggttctagaaaccctggagttcagtataaatccccctgccaatcggttggctatcgcaaagccaatcctccatgtagtccaatggctatgtcgtgctattgttggagcttgtatctctgcgtatcgctcatggccgctactgttatcgtcgggttggttgtgctgcgcctgccaattatttcgtggcctaagctaaaagatggaacacttaggacgctgctgctgcagaacatcccgtttcttatatggcgatctcattctgtaagtgggtcaaatttaggaattcctgcaagtcgtgttgatagtgggtctcgtagatatggaaggataattgagcgatggtgtatgacatatattgaatcccaacgtgaaggccatcctgatctcgactaacctgtcataggaaaaggggtgtttggcatcgcgagcgaaaccggtcgtctattcgagtagtcagactaggtataaatgaagtcgcgcattgtttgctgatctaacctcgaggcagattttgagactcgccgggcattattctagatacgacaatttgatgagtgaaagccacctgagtagttacaggtcggcgcagcaagctaacggcaaaattgtctcagattagtcgtaatgataggggaaacagaagacgggctggagtgagtaaaagcaacgtaaattgattgagaggtacgactagtcgcacagaagataacgcagggggcggagctcggtgatccgaatgaatagtaaaaatgccccaccaaatcgagaatcaatgagactaagaggtgagggtaagaaacaaggggattacaagggattgaggagggttttatagatccacgcacgggaacgtataacgacaaagagcgctaagccgaaagggttcgtagagccaataatatgtcctttcttcacccaatgtccgatatggtgcaatagggtgtcccggtgaaaagaccatggttctgcgtggcatcttgtgggggaaaccgtggtattttcgcgcaggcaagaataaaggatatatatagttcttgggagatgattgacctaagactagccaaaacacgacacttgcatatcccagcggctccatcatgagtccatcattgtagcccaaaatagtgatataaccggcttatgtccgattcggtccagcctggtaagcctggcgcgtgcaaatcccggcggcttgttcatgagttctgagtagctctggtataaaagccaagattgtcacccttcaaatttcttataaatcatcattcaatcatcatttccttctgagcctattataattgagatgccatcaaaaggtcctcgaagccgatcacggactataatgcctttatccggctgccagacctatctatcaaacgtaagagagccaaagtaataaaataacgtctacggggaattcatagaaggctttattcgctagtatttagataaatataacgaagaataccactctagtcttaacagtggtgaggcttttttagaatatattagagcgaagaaacaggccgtaaccttcctcgtgaattaggacaggatgtggctgcagtattctttaaacagtcaatttgctaatcctttgctgaccagagaagctttctaatgatcttagtaaagagtataggcttaacttacgcgctaagcaatagccgccatttagtatcaacgagctcttacttattacctatcatttgctagatacctgcgatatagctttttgtactttccgatgccttttacaattaaacacgttgcgaaaaatgataacttcaatatcagcccaactctgtctaccgggtacataaggggcaatgatgcccttaaatagaaggatattaagctattcatggtgaaaaccccttaatatgtatatgccgaattgggcacaaagtgcgggcggggtttgggggtacttttgtctttgctggctgtcagatcaagaacattcttttcaccttactcttacctcatcgcaatggactctattgaattttcaaatcgttcagcttatgcaactgaattgggcattgagttccttggccctaacgaattcgatcgctggccagagacccatcgaagattgtttgaagatgtacaaaagctcggcaatcaaaaatataattcgttcgttgttcgcatcaccagagaatctattcaaaaaccatggatgcgcgcaacaaaggcgcgcgccgagcgtctctcaatgttggccgaacgatcctatcgcgaacacaaaaacgagtcgggatggaggtacgcagttgagaacgagatcatgtaccgcttcacagtggaagtttcctggtaaggaaattcgaacagtttgttgaatccagacttaacgtacggcacagcccgacttgtcgcaataggctatggcaatctgaaatacctgctgcaacgggtagcatcgagcagcaagcccgctcactagaggatcgacgacggaaacgcaagccatgccagtgttcaagcgctcgaggtgacaataggtctgttttgtgttctatcatcgaggaaattactagttattccttctaaccagtccataggtatgatggcggagtcaatatgctcttttcggacagagcggaggcgatgatcaaacacaatcccccaattgtgatatccacgcatccgcgtaaattgaagaattccgaattcccagatcgcatctttggactacgacagaccgacaacctacgatgtttgctagactcgcttgataagaggcatatggaatcgtccaacataactctgcgtaattccatagagctgagtccatttggtgccgagcctgagcctctacttttcccgttcttcatgatagaagccaaatcaagccagggggctgaccgagcaaaaaatctaatgcagtctgcattttgcctccgccgtttgttgaaaattcagcatgaccttgtcatcgcaacagatgaggaaacgcagtgggcaacagggccgctcatatggtttcttactacacgtggagaacagtgggacgtatacgcaggatttgtggaagaagacgatagtgaagttgtcaaatacgtaggtgaaaattattccctacagaaatcattcgaggtgcttactagcgtcagccttttgttcatctgtggaatggagacattcgctggcgggacggcgccttgcagcttctgctggttattgactacatctttgattgggctcgtgatgtctaccgagatgccattatcaaagaactcagcacaatagcgactggtgaagtaaacgaccgagatccagatattttttcgacaatttctcgacagatgtcgcaaattactagctggatggaccccgacgaagcgcaaaccgagctctcattcatttctgaatcaaatgatcccggctttttgaacataagtctaccagagggcgtgatccgtgatgcttctatctttgagtctcgtttccttttgctccaaattactgaggatgacgtcgataattttcttctctctttctcatctgaagaggatgctaaattatggcttcaaagtgtactaaatcatcttgcaaacgcctggaaagtcagctctaataccatctgcgccatggaaagcatttggactggggggctcaggctaacacgtgggaaccaccagcggcatgaattgttctatatcagtatcacaatactgatgtttattaccaataactgggagcctacaaggcagctcacgtgccttgcaatttctgaaggtgctttaaacactcttttagaaaagtttgcgtgcgagagaacttctagctttgaccgttgtccggaagtaggggaatcaagtatgcaaacttttctggagcgcatcttgaaacagtcaattatggataatcttacagcagcgatatctatgctgtgtctctcgagtttctcttctgagcatgaacagacgataccatactatttccaggtgaagaggtcaagagaagttactgctggacttcgagttgataaatctcctcacctgacacaaatggtgcaaagcgtttacttgaaccacaaaatcggacaaagacaaccaatggatacatatgtctccttctcacgccatcaaagcaagcaaaacatcgagtatagaggggatacgattgagatgtggcctcatttaccacgacttgtgaaaagcggaaatgatggcgtattggtggatgggatgttccactcgggggatttcccaagacgagggctctttgttttccgtgatttggataactatgaaagcctatccagtctattaactagggtatcaagggatggtatctacttcaaaactttccagttttgtccggaccaaccctttgtggatggatttcggcacctcaacagcccggtccgatttactcaagattggctaaaacggtcaaagtcaaagtcaatactgtgttggggggaaaagctggaagccttggaccgcctacgcggctgccaattgggtggaaggccatcttctccaatgatcatttcgtcagatgaagaataagacaaggtaaatttgactaaactatcaatggtaataagcgaaataccgttaagatacaaattgttagtttcaaggagaatatattcataccgtggaagcctgggactcaggatcgttcttggtcaatattggatttggaatctaaggtggaaaagatacgtataaagagttcacagcacattatggcgtcacggatgatgatatgcacagtaaagagagaaaagatcttctacttgaacaaaggtctcgctaggcagaataaggctcaagtcggtcctaacatacatttcataaaccagaaaactttgttttcactcagtcccaggggtaaatgatgccgcaatgcaaatctcgagagaacttcgcatctctttgccggggggataaacgagagagactttgagattccgaccatgtagttccatccttacatcataccagatctcataatacttgttaccctgtgatcctttcaatgggacaggatattcctctttccacttggtcaggtccacactgatcatcccagcgctctcacaccctgaatatatgtcagtctccacgttaatcgttaatccggcgaatacactgcaattatataacaagatattactcacctagattgtaaggatgagtaatttggtaatggtcttgagcattctcaatgtctgagtagtacaggcgctgcgaaaagtcccaatcttcgttttccccaaattgttgatacagcgtttcgctaaagcaatcgtcgaaagcaactatttgaccctacgcacggtgttatgtgttaaccagaatcattcaaacccaaatgaacaactgcatgatgagcaaaaggggtgacattttacccttttaatgacccaattgacacagcgatgaacataaagttttttgtcctttgggtgtctcgttccgccgggggtatctctatggccagggtacttgttgtcatattcctcattctggagaatcccgatgtttgccataatctgacgagagggtccgttgcttttgtcgattgcacggtatactgctccccgcgaaaccagagtctccgcctccctgccacagacaagtaagatgacgttttttaatcgtttcgaggggtgaaagtaccaatctgattgatataaaggctggagctcctggaattcttttttcaagaattgtctcaaagtgggtgactgtgaataccctccaactagcataattttcttggttcattaggcagggttgccccatgattctcaaaaattggcagccttacctgcacaaatcttttcttctctttggatgcaactatttgttcttgaatgagcttcgcgataccattaagactgtcctggaaccagccaaacacttcactcctgaaaataagcagaagttagaacatagcctcagatagattgaaaagccggaagccatgtggggaggacgtcttaccacggtactttaaccctgtttttatagaagcctttagtgtcatctgcctctagaccatgaactatgaagtattcaaacccgtcgaggccttgcgaattgtcaaacactcgtttcagagtgccttcgaaatgcggaagaatgttatgctgaagctgctcttcggctgatatgtttttttgttccaaagattcattgtttctcagcaggtctctgaaatgacgctccatagcatgattcacatacaccgagccaaagttcccacctgtttcaaatgtaagggcttgatattcaacgcgaaattcagacataccggtaggagtggcagcttcactgaatcgaaaagggcttcgagaatcgattgtgtaggtggtgacatcctgtgtagtgttgtaagccttgtaatattttgtcaagagaaagcagcaactaactactgtccctcctccggcatcacacacgataaatgtttctcctgtctataattaatgagtttaagcttccaaatacattattgcgctcttatggtccaatacataccataagggatttcgcaccaacgagctggtcaagagcaaatgccgacgccgcctcgggttcgtttaccaagaacaaatcaaacccttgaccaaaacccacagcttccactgattgtttcaagatctcttgtaggctccaagaagctttgagtggccaaccggccggaacagacagagctagctcaaccttgcttgtgtctttaaagctttcaaactgacctagatgcttcttggtgtgtctgaaaacttcgaccagataatctcgaatcacatcgttcacatctttgcctaatgccttcaaagtttcttcgagatcttcatatggtggggccgccttgttggtttgagaatcggtatatgagccatttgtagaagagccacggttcccttgatgattgtgaccagacagcaagtcagctagaagaagctttgaaaacttaattggcttgttagatgcatccaacgcttcattgggcagaacctcttgggctttcagttgagctccgtagccccagtaaaaatcatcgccgaggtacaagctttcgctggggacctcgcccctattgtgactagaagcagggttgggccatgcaataactgattttattgcattcttgcttatacctgttgttggtcgtttaccaagcttgaatttatagtatgaaactgaggtcatggtagttccaaagtcaatcccgacgagaaatgtgggatttggcgttcgggggttgccatttgatcgcttcgaaccaggcgaatccactggttgttctccgaccgtcttgttggagcttgaagaggtgatacgttcattatcgtcagatagaatgtcttcgtatcgccgctttcggtagggcatggaccgctttgacgtgggaggcatatttgatcgagtttcgacgaatttccaaaataacccctggaggtagaaattaaggggcctgtccgtacggaaaattctgtgcgggctaattcatagccacagttggcgcttgcgctagcagggatctcgttgtgctgaggttagcatggcgcagctaacatagcacagcctatgaaaccgccctcaccgactattctcgcacattccagtccaacccctggaaactctccttatcttcgtcagctgcatcatcaatctggttttgttgtacatggtggtcacctgaccatcagcccggtgcggcaggcaccaacccccacaactagatagttgggcattctgcccctttaggaatagagaactctctccctctctcattccatcactacactgtagttgcatcgggtttgaattctcaaacatatcaagatgagtctggaagtccagatgccgggggttggatcatcgcgtgcaggatccacgagctctggtctcagactcgcagaacggtggtattatgactccactccacccataccggaccagagtgatcattttccatatctcatgctagacacaaggctccgtcctaggcgagataaacgcagggaggaatcaaatccggcgcctaggcttaagagagagctgtcagacgactcttctacaagttcagcggcggttaagaaccgaagaatactcaaagtttcaacccaagtaggcattaaaatcgattgagtggcaaccattgttaaggaacactgaccaacagtactttagcggctcaggggagccgatcaggcttgcgtcaattcgaccagaatctgtgagacaaatacgagtgcatcagtccccgccaatgttgaaaccccgcatggaaacaccagaaacacggatatacaggacaatccagtttccatcagagagactaaatcagacatgggtcttctgaagcggcagaatgacctgctgaagcgggagatcgacctcataagcatccgccgcgacaggaaaattgtttctttacaggaaaatgtgacctgtctccaagaattcaacaaagaactcaatacaatgctgggccaatacagagaaatgaaggaagttgagacccatgcgtctggggtactggcagatgaagtcatggaactgagagcaaaactcagacaaagagacgagcaattagaaggaaaaatccaccagatttctacacttgacgagcagcttagcgctcatgaggggatgatacaaatcaaggaagattggcgtctcgattttacttgttcctcaagcttctcaaaggctttggctgaactggaaggaaggacccggcgcttagcagacatgcttgcgcaatgtttatcgaggcagaagatctcaaaaatgcgtaaaaagccacgcaaggaaaagttacttcatagcttcgttaaacgcctacttggaacagtgggcgttctggataccaatccaattgaggcgatgcgcgccttaatctttggttttgtgcgagatcggatatttttctctgaatgctggacagctctacactctgagggctatatactgcgagaattacaacagttgatacgaaagacctgtatgtgaccagcatgcctcagaacaagctttggctaacctcactgtttcacccaacatagcccctcctggtaccttggaatcactgcacagagcttctgttgaatcaatgctcaacgatgatcatcagtttaagcattgttggatccaaaaggaagtggaagatacccaaactcagttcctgaggctattctgcccgttgttcgatactcaggtgtttgaagaagtcaagcatcagatcaccagagacttgggaatcgcttttgaaggtgcttttgaagcccgtgctcggttcataccgcctgaggggtctcggtatagactgttacacttcaaggctggggaaaaattcgatcctgcttatatgaagatcgaagaaaccaattcaaaagcaacttctgcaatttcccatcgaggtattcatcggattaaggtatgtgtccacggttgccttattgagcaccccatcaacaaagattcttcttccggagatattcctcaatcactggatcagcctttgattcctgaagacggggggctctgtggcagagaaacagggatcttgaagagcgataaggcaattgtcatattggagaattaaatttatctttgaaaataatgcatataaaacagccttttcatatccttgtcctcgccttggtatctgtataaaacagtctgtgcaagcttcaccaaaagctcgcatcatttgcggactatagagaaccacgcactgcaatgcacagggacggagagcgctcagacggggatgcaaaagtggaaacaattagcatccaccaagaggcgtggtctgagatcgaagaatcgtggcgttgtaatctagctattgttctaatttggaaagccaaaagtcatctagtggatactggctcgaacttcaggaagacatggatggcttaattagctcactgtcaaggttgatggttggcgtctatataggcttgtttttcattgtggcaatcttgctaatattttgtttccccacttagaagggttcggtcgctgattatttttgctcaatttttgaagagatgaaagatgcgaacgtaatgaaaaccctgggtaagtggactctctggacatttaagcttgtcgtgagcaagtatatattgatacgaagagaatctgcgccaatttgctaataaactttataatctataaatctataaagataaccaacctactcttcggtctcgaaaattgaagataatatctaggtattgcagtgggggtttccacagcatgatgactaaggggctatgtgataataaagcacccccgaggcatagatagcaacgaagacacctttccaccttcacttctcaggagtcaccccatggtgttctcctctctagcaccctactactccaagtgacgattctgctctcacacctgtttcgcaggcaggcatgtcgttgaccctgtcccagggtcccctcttcagtagctactaaaagcttggtgttaagaaaagaaagaggcctacctaattattaaggcatgaataacttgtataaccaattttctaggtgagctctagaactgttcaaaggtgagctcattatgatcagctttatagaaatgagctcgttatgagcaatcctctaatctctccatattaaggaagaagaagaatctctgtttcagatgcttaaggattagtcttgcaatcaagatgaattatactgccttagagcctcatttctatcctagttgatgtaatttcatattcaattcatacgtctttcactatcttcttacctggactttaatcctaacaaaagcaagatagtaggttagaatcactaatgaaagctttatattagccaaattcataaacagattagaaacagagctaaaaataggtggttaaggctcaggtagtgaccattaaatggctttgctctagctaggtacctagttgatgttgattagtataaagccaaccttagaaattgccaagtactgagatcgatctggacgccacgaggggtggggcataattatgcacatgtgagcgctttataaaatttatctctcaacatagtttactagctggacgaagaggatttctcaattttcgggaatcaatttcccgagaaagtctggaagtcctgctgcatccatttagaggctatacttaggattcggtgaaaaatagggtatttcaaactgaggaactgaggtattgaccttataaacctgtattcttctaacatccaaggctagctaggtaccaaagggaagaaaactagcagtggccccacttgggcacgtcgagccgttctgttcctaagccctagtgtctctactccgtacgtaagaatttcattcctttcggagtaagtaagtaaaactctttccggtactagtagaaccattttttatcatggtaaaattcttagcgctcataaactaatttcaaatggctccaccgagtgcaatttcccttgttacgccactcggaccctcaaggggtatacgcctcgacttcgctaaatagtagtcctcctgcctcgcccacttgggatacgaaattgctttaatttcgtccattatctaactctcctctatttaggagagcttacccaaatacattgcaatgatagtattgcggacattggcccctactgccgccctagcactggcagttttgctacctctgtccagggcacagcagttcgtcggaaccaatatgtttaccaactatacgggactgagtacagagtgtcaacaggcattggcgacaaatgtgacctgttcaccgtacctaggaatgatctctgagaggtaggtcgatttatagccagatatatggcccctccccttagaacagaaacgctattttagaccaaattactgatgatcgtgcagcaatggtattatgacaacggattagatcgaggccgtatgtgtcgatggctgctatagttctctggaaacagccagaactaccatcgtcagtgaatgtacccttgatacggatatcatcgtggtcgagaacgtggcataccccgctatattctttgtggataattacttattcacatatgagttgtcttgccggaccgacagcaccacgggtcagtactgcgatccgctcgtagcctcatggtcgaatcagtctcttacaacgagccagttgtgctcagactgctggttgggcgggctcgccctagaactggctagtcctttcggatatgatgatgttatggcgcaaaactatgcgtctctgacatccagctgtaatgcgaccacttacagctacgccactccaacgcaatatgcactgaatgtgacggccacgactaaaccagcggccgtcacaaccaccatggcatcgagttgcacgggttcatacgaagtatctgtcggagatacctgcaactcggtggcccaggccctcaatgtgtccacgtacagtctgctctacatgaacaacctggatctatactgcctgaactgggactccacagtggttaatactactctgtgcatcccgccacagtgcgagactcgtgtgtggcagtcgaccgacacatgtgatagcgtggtcagcggcctgtccaatgtcacgattccgcagttcctgacctggaatcccaatttcaatgctctgtgtcagaatgctgtcaactatattgactatgtggtttgcatcgggtgggttgtaatttctcgtcttattcttgtcccctattgactagaacataatatgctgaccatggcccatttttaaagtccccctggaggttatctcaaccacaccaccgacatgacaggtaccgccacagtacagaacccaactaacatcatcacggccgttcctgcacccacaaacgccctcaatggatccaccacagactgtggcctgtggtatacagtacgcttactccttgcccccatgcacctactcattccagttgataataatcgatataggtcggagagggagacacctgcagtctggtcactgttgccaactccatatccctcgtggacttctacttcctcaacccggagatcgatgccaactgcaccaacctcgagcttggagaggcttactgcattgccgctgttggagacatcagcacatactctggctatccagtcacaacccccttatttactgtgaccaccgccagtttccccgccgttgatacgtcgattcccacgaccaccagtgatccgggattcatctacactccaacgtaccttcccacggccccggacacacgtacagactgtgtgcgatacgtcaactatgataacagcacttataacctcaattcttgcaagtggattgcctggctgaatgaggttacaaccgccaacttcctctcctggaaccccagtctcaactcggatctgagcgcgtgtgccatgcaaccggggtatagttattgtgccattctcaatagttcgtacagtgagtatttcttttgcgatcctgcccctctttcgagttcaagtctaaatgcctttctcttcttttcgtgaatatagcaaccggcgatgactacaccaccggcagcgacagcgaggctatcagctcttcacaatgcttgtctcttaatgctaccgagcccagcactgtctcgaactgcaactgctttacggggatctatagctatcaaagtggaggtatggaagaattgggaagagtgaaagataatcgcatacaagcatgctaatcatctctagactatgaatgcgctaatatcgcggatgattttgacatcaccgaggctgaactcatcgcttggaacccctggctggcgaccgactgcgacgcgaatctgtacgcaaacctcgccagtggtgatatgcgtgccgtctgtattggagtgaactccaccgtgtctgcaactaccactaaccccagcactgctagtgctactgctactacatcggcagtaccgacacagactggatatattgatggatgccaggagttctataccgtagagtctggtgacgattgttcgaccatggaggctgaatttggagttacccttgcgcaactttatgcttggaatcctagcagtaagaccccatcccatattgacctctcctgatgtccaggaacctaaggctaacttaaactacagttggaagcacatgtacaggcctctggcttggatatgcctactgtgtaaagggtcccgcggccacagcaagtaccacagctagtgcacccacacagactggcattgtgtccaactgcaacgaatatcacactgttgtttctggggactcgtgtgcggcggttgaaagtgagtacggggtcacctttgcgcagctgtatgagtggaacccggccatcgggtcagactgtgaatatttgaatgttggctatgctatttgtgttggcgtttcataaacacaaagaaagccgttggaggggaaaagaacatgtaagtagatgtaaagaacagaatactattgcctacgtacattcttctctcgtaaatagtagtctaccggttaggatgactacatcttttcccgcttcttcctctctcctcaagaattaaaaccaatagccggtggccgttgatactcgaggtcccaatccgactcattgcgcatagtcgtagaggctacaatctgggctcgatcatagtgaaccttcatccagcccacatcttcccgcgtacagccgtacaatggctcatactcatcatcttcttcctccccctcaggaatttctggggcccaccgcccatttatcatcaccacaaacccagtagtattcaactcgtccaattcatcctccggaatatccaacacggagcgcactgcatcctcatcaaccaagatacaaagccggtatcgggctccatacgcccactccgcacggtcataggttaccccttgctccgtctcacaggccgtcctcgcccactcattaaaagcgtctcgtatctgagcgggtgtcgcttcatcaaactgaatcttatcctcgatcacagtaggccggaacgagtcccacatatcgagaccttcatagtattctagtgtccggcggacctggcccaggaatcggcggaggaactcttcccagtccgagtcgcttttgtaagtggttcggtatattgcgataccccaggacttgaatccgtcatcttgcatgtttatctcgatgaggtcggcttcattgaaggtaactgggtaccctggggttcttttggaatctttgatcaccatagttggtgatgtggacgaaaatggtcgaatgggcaattgaaattggagtgcaagattttgatggggccccctttttttgccggatcgtgctgctgtgttgtgccttggcacgaggatgggttgtccagtagtggatagagataaagagacgatgcttgagagagtcctgcgggcactagattgaaatgcgggtcttttcagaagacttctagccctgatagagatcattgaggacattgcatgatttttgatttagtaggaagtaattcagatataagagtcgggagaatcgcggtttaaaattcaaagtaaacagcgaatggtcctgatgtttagagtctagaccaaacttggatggccatccttcggatttgatatacccctcaatgtgggactggccagttggcagagatccacgtaatgaacaagccactcaactcatctgttcaaatatgcaacctttcctaatttttgagtggaatcgacaacctcatcgcagaattgtgcgagattgaagcatctgagctcacagaggaatcttttcatcacatccgacaggattaacaagcagtcccgcagtgtggccagactaatctctcattcatctccatacaccactcatcctacgccactgctttgccactaaggcgtcaaagcgctacaaattggctatctgcccccaaaatctcgatgtctttggggttcaatgccaatgtctcggcacagcagctggtcgacattttgccagttggaattgccatactcgatcaccactacaaggcaatctccgcgagcagccgtttccaggagctgattccatgccctgaatctgattccgcaaatgctggctacaatcagttaatccagatgatcatgaacgtgcgattgccgcgttgcgagatgcttcggaagatggggaaacgctacgcattgaatatcgcacctccgacccggcatccgtttggtgcgccatgactctagagaagctacagcacacagatgtccagtcctttaggctgaatgaacacggtggattcgtctgtacagtcaccgacataacatccgctaaacgggctgagatcgtagtaatctacgtcaccgccatctgcggcttcttttccacggcgcatcacaaccggacgaggtcgagggcaatttttatttaacgggagtcattgcgctttttgaagtaagcagttacctgattgtttctttcaattaacgtcaggcaggctgtcataagacagagatggacacaagacaaagatagacacaagacaaagatagacacaagacaaagatagacacaagacaaagatagacacaagacaaagatagacacaagacaaagatagacacaagacaaagatagacacaagacaaagatagacacaagacaaagatagacacaagacaaagatagacacaagacaaagatagacacaagacaaagatagacacaagacaaagatagacacaagacaaagatagacacaagacaaagatagacacaagacaaagtgtcatctactaaagccaatcgatacagttgatagcgaaaatggatttaggtctagacaaatcgaaatatggcatagagattcaccgtgctacgtatcggttggcggcaaatgattggcgagtaggtaccccttgtactcggtcgaatccattgtcgatgatattagcccctgctatgcgtgaacgatattattctggtatggcgagagctttgaagtgacaagttgagtttcccttgactaaatttgttctgtcaagaaaaatcttcttaacattttaacagaagacttgcttttccattaagggtgtgatttataaaactgatcaattgttcaaagatgatgtaccattgattcgatgagcggtactccaaagtggagcaaagagtagcagcgtggagccaatcagatgtacaactttatgcaaaaacgggttacccctcagattgagatcccgcatggcttgattcattttgacgacgacctaatattcctaagctctgcatgagtgggcatctgttatgtacctgcgctcttgcaaccgctggttcagagtcatatcgacgacgaagcaaattcgcttgggtgaaccctccccccctccccttcgtcccccataaagcagcatcgtttgaatttatacctcttggttctttgatggtttctttactggggatatcagcgcaagctggggtgtgaacgagtggtttgtatactcgaccgtagtaaatccagtggaattggagctagtcaacctcatcttgaagctttttgatctccaagacccttccagtcgcagccaagccgtcatgtatcgattgaacaggcgcctagagtatgagtgtatcatgcccagaatcctcgcattcatcaggatcatatgatgatcgaacagtatcctcagggcttcgccagtgccgtcgataatagttaccaatgattcattgccgggtatctttcttctcagtctcataaaagcgatggcagtcgagaggcactgaccctcgtgccaattataacagtttgggcaaatgagtatttctatctggtcctcagtaaccataccaattccatttttgatctcattataattaatctttctatcttgggtgtccatacacctacaagatacacgcggcctttgaacaaaattcactcgagatctgctacaagtcagcccttggtataaacattgaccgaagataaacattgttagaccaaagccatttttgagggtggtacgtcttgcactcgagatttcaggtcaattttcctgaagaacttaacccaagatacttaaacacccaaggttcgtctggaaaacgaaagtagaaccaaacttttcaattgaaattctaatggattacgcgaatccgttcgcagattttctagtcgacatctgtggagaactggcagatctacctaaatcttccacttcctccatggctatatacattggctagctaggccggttgtcgacgaaacccgttcttttccctttacgttgaaaatgcgcttttgtgtcacatattggacgaaacgcaacaagcttggctaaatacgtccagaatcagacaacttacaatagttttctctttgtgcgactaccacaacttggtgtaaaagacgccctgcgggcacttaacggcgactgaatgtcgtgcttgtggatcttgatattttgggcattttaaagttgccagaggcttcgcctattcaaccatcttccaatgctcctggccataaaacgatgctactttcactattccctaaggtccagcggtaaagagagcaagtattggacgagaagtgctgttgttgaaactactctaaccttgtgattgtggatacagcgggccagcgcttatattatcccgtccagcgctagaagctttgattggtctggctaggtcccccacttcttcacctcgctgcctggcatgtccggcggcaacatgtttcttctctggaccttactgtcgtttcaagaactcccttttactagaaatcgataggctctcagtctgcttcgattccgctactctcgaagactgagtcttcctatcaccgccgagaccctgcttcacctgtttatctcgatgacgcccgaggggtttgaaggcgaggccggccttcacaattcaagccacaacacagcgaggatcatttccgactctagctttttcagggaacaccaggcgtctacgctccctactccggtatagaggagcctataaagccgaggaatgtatactggcctgcgagtcttttaattctcaattttatgctggaccttcgcgaattgatgctcaaccgaccgggtaaaactgcgaagtacaacgagtaaatcattgtttgaagcatggaggctactcttaagtagccaatgcgcactttctgtacgagaagtagcgagttcgttgaggtgaagatattgtgaagtgtagcaatgaaggaaatgttcttggcagtcgtcgatccattctttttggatgtgttcgagaagagggaggaagaggggaggtgtatatcgctctttgaaatcgctccattgtcggtccttctcttcaaacgtaacggcatatacaactcggtttcaccgctgaagcatcttcttccacccctcttcggctttctcacggtcttcctgggcttcagcgggggtaaggcggtacgaagagttatctccacgggcttctcggcgggcttgtgctacttgatcggcgagaagggggcggggtttcttcaaaatgttcatattaatgtgccaggtgcatgttatatgctttgtatctgggaaaatgaactcaattgcagttagcaaagctgcctctttatccgtgaggattgaacgtggggctgcaagaccaagggcctcgtaggcttccagaagacagccaagcattgccttgtacgtatggtctttctcatctcgcataaatgcaaaagcaaggtggaacgtagagccagtagccgcaaagccaacaacatcaagcagggggaggccatatcggttggtcttacatgtacagtccatggagataaccatgggttcttttgaagcattgagatactctcatacttgaatatcaacttattatttttgggaagttctatcaataacgcttggagaggagtacatccagcaagaaagagctggtgtagcttgcgacgcgtattgtagatatcctgggaatgaggatagtgtcgggatcggtctcacgtagctcggtaagaatctctttgcttgtacggccttgctgaattgcattggctactacagccttcttatgggtaagatcgagagcgcgttggatagggtgaggcgatgctggtgagggctgacggttgtgggtagggatctcaacggtaagatgtcaaagacaagtcccaatgactagccgaacagccatctgaaaggggtatccgaggcgtagtgttgtaattctccggcattttcggggtatgggctcattctcgtcgtcttcattggtattctcctcatgggagcacgcagcttctaagtactgggcacctttagctaatatcggaattcagcacagctcgataacaattaatattcgataatcaatcatcaagaccctagtatctagctactctctacattcactgggactccctgttggttacattacatggcattgaatatgacgacaaatcatctcactaaatcgatattaaataacgaaaacggaggatgtgactaacttggttaaatcaaatttatattacttaatgttagtaataaatatttcgccatctagttggaatgaccttagtggtatgttagaaaaaattggaattggtaaaaaggataaaaataatatggagacgagtattgctataaatgcaataaactaacgcaaggcgaatttatattcgagttactggctatctgacccttttgattaattgtttagatcgtcttggtttagggtaaacgccgttagtatttgaaagtttgcgtttagctgactatctgctataagagctataaggtggttcactcgtaatacattttgtggtactatatagtatttcctgcgtctgagattaatctgttatcgagtaggtgtctggtatactataaaccggatagttattgtctttatatttctttcgattagtttctagtaaaggttaacgaaaagtatattaagagctaagggctataatatacccgcttggctagtttgactatagagagtaatagagtgatcttctattaccttaggcactctgtccttagttactttattatctaggtagggacaattctgtttaaggattcgaggctcttctagatccttataggctagctatagggatagagtagaaatagaattaatatctgtatacttgtctactagggctggaaagcttttattaattaatctctcctagaattctagtatagctataatcttagtatcggtattagaactaagctactctgccttattatagctataatccttactaatataaatcactatagggttagaagctgagcctaaaggagtaggattatctctaatcactataggattagccttagtgcctaacttagaagaattgataagtttatatataactagtataggcctatccgaatgcttattagagtttgatacttcgtaatactaagttagcaaaatctataatactttaagaatatcccttactgaaggtattgtatatattatttataaaagagcttatactaactagaactagaagtagaggtagaaataaatgcttaataattgatatagggtaagactaagggctataattaaaatcaaagacctaatccaattcttaactgttactatcggagaaatagtatataagatatatagctttatatctcttgtctagcggattataccttatttagcctataggctaaagcgggtacctttatctaggtcttaactttagaccgtaaggcctagtaggatcgcttctagataaggcctatctgctaatcgtctctatgtctaatatatattatataggaatactatacgaataaccagcttattatctatttaatctaataatatcacaaagcgctattactatttacggaggactgcactcctacttatcgactgcgcctagtaacgtcgccaccgtttcgattaagctctgtgtgccagtcgttctatagcctaggatagaagacgaaatatgtaagacggacgaatatagagactaaggacccccttatcatccctagtccgcgcgacgtagatactataggagtaaatcctattttcttattagtccacttcgccctctataccacttgatcatgaagctaacgaggatttcggtcacagagcgccttcggtgacaggggttaggactgcgaagatctccggaataaggacgaccacgaccccgagataataccataataatgctactattcctggagaactgcaagtacgcgcatcgtctgcgcccaatgtcattaccactggattgattgagctctgctcgccagtcgttccataactcgagacaaaagacaaaacgcggaagagcggaccaacatggagacacacgctacctccatctccagtccgcatgacctgttccttgtccttctatctggtcctctgtgccaatcgatcgtgaagtcaatgagttcggtcataaggcgtccagtcaattgagctttacttgccagtcattccgtaaccaatggctgtgaatgagacgcttatgaggtactgaccgagaaatcaaagctgcctaatcgcctccagtcctatatgtagcttgtgttaaaggattcaccccctgttgttttatccgtccatctcagtatgtctgctaatggataaccacgtcaaaggggtggtcaaggacaaggcgtacttggcgagctgagttctactcgactatttctgaaactagaacgatggtatgaaggatggagaggaactggggcgtgcaaacggtctggggaggtcggcgagcgatttcagagatcattgaagcgcctcaatatggccgctgtggaagcttcatattatgaagagcagggaaaggaggggatcatgttatccagctttagcagacgcttgtatcgttggcttacgtgaattgctgggaggagcgtccggtcgaatatgcaactgatgcgttttaaccgacattcccctcggttcgaaattgattggataccatcagccacaaggctctcagtctcgtactgggccccaaggcagattcacggacccgctgcacataggcgattgtccacagagggcctagggcgactgaaaccaaagggcgcaatggatcgacgacggaccggccgactgacatgtgaggacggatctgccggtcggcgtggcggaccaagggcaaaaatgcctcatcccgagcgtaatggcgagggctgagagggaacggggcagggcggaggaagcagcgctgattgcgctccaggggtcggaggaccgcaaaggactggctagttcacgccggcgatagcggggagtggcggagctcggtgaaccggatcaatggcaaaaatgcctcatctgcaaggctcgcatggcgggcgggtcggggggcgggagaaaggaggagcaggagagccaaaaagttgaaggggcgatgggggaggactttatagaaccacgcacgacgacgcacagggcgctataacgctagaccgaaaaggccagcgctaggcctaataacgtaatttgcggaaggaatttcaagcatccgatatggtgtagtggctaacatcgccgtctctcacacggcagccgggggttcgattccccctatcggagtttctttttgctttttgttctgtttcccttcgctcttgtctttttgattattttctacaggaacgtaatggtaaagaatcgtttacatttcaatttatgcgtgccattgttatcccgtaaggttcctccaatcttaggttcaccgccctcgatatcgcgacaggaccgcaatctggacccttgaactttttggaagatccatggatgtgacgcgatgcctatttgcatcgagtgctcctatccagtctctcacctgtacagcgcctacagtcgtgctgatgaccggtcccaaggcaagggcgtgcgactgacgcaatgtccccggtgccagcggtttgccgataaatacgttgaatatgactttgtcgtgctcttcattgatttggtgctcattaagccccaggtaggcattatacatgttctcggtacgaccaggctgacttatctggaaacaggtataccgacatctcctcttcaatcggctcgggcgagacgacaacaaattcaatgtgggtataccatctcaaacaattgtgagctacgtactgataatgtgacctttcagcggtccatcattcgcctcggagttcttctgcttctcttcgacgtctacctgacctgggcacgcatcgagaaggacccatccctcgcaacaaccttcctgtcacgcgcccctatcatcgtccagtacctcttcttcctaagcttgaatgcagccgcaaccctagctcaccacctcaccgtgcgccttttggcctcaatgctcgttccaaagtcgcgccaatacagcggaccagacagcagcaatgccaacaccaatcctagcacaaagtctactggagatgccaccccttccgctcccccaacgccaacaacgcatccctcgccatccggagtctcaatacacccgcacgcccagaactccgccaacccccccgcaagcctgctaaacccaaacccaaccccaacccctagctcatatagcgaggtcacctccccaacagacctatccccactaccgcaaggtacatcaatgggaccatcacctttacccgcgccgcccctgcgccgggcatcaacagccccgctgcagaacattcagcccctaccccctccaacagccgcaagcccagcagcgatcagcaccgctctgctcgtcagcagctgcgcaaagctcttcccaatcctgctagtaatctggggcgctgacggtagcggcaacctctccgatatcccagcgcacagccatacagcagcacagatccggtccgcgacgcagtcggctatggtttcgagcgcggtgcatcagagcctgttcgccacagccacggaaacgtcttccctgtgcgcgacagcggctatgtcaagtccgccgtcggctgcagttagttcttcttcgtttctggaatcgtggcttggtgtcacggcttcttcgcttcggacttctacgccgactagttatctgacggggctttttgacttgcttgcttcattgctttctcttggtgtggttgatgcgcacctggtgctgctgagtaatatcgaggccttgtatatcttgcttggttgtgggtatttgcgtgctgttgctgttgctgttgcgggccagatcgcccggtgggcggtgcagagggtgattctgggtgctgtgggagttggttaacggagtgattttgatgaatacttaggtacttgatatgaaaactaatttcacctagctttcctagcgtccatgttgcttagggtactctacggcgtaaatcaatcggtcgacctcaccgattagtacatagatatagtcgtaggcagtattggactagtaaaatgacctaaaagggtatgaatgctttccatacaaaaagaaaccggccaactgaacaaaactgaatcaaaacaaaagcatacacataaaacactgccaagaaaaggacatatagggaaagctatacaaaagcatgaagcagctacgaactcacacaggttcgcaatacagaccaagcacacggacagagaacgagaagcagccttcattcccctctaacccaggcgcctcgcagcgcgggatgagatatatctaacatcatcttataatatcccatgacaagaggagacaatatctcacaaccgacagtctccaaagtgtcagttgacagcattgacgaaaaacgcaagaaaccaagggaaatgcctttattgcggtacgcgatcaggtctgatgtctgaccgctttggtgcgatgagagggtgccattgtgagaggaagacgattgctatattgattatgttagtatctacacagatcatagagatatgtggttagagagcatgggtaagaagaaacgtaccccacatcaaataacaagaaacgaaggtaaggatgagcgtgctgcggaagaggctaaggaaagcagagtcagtattctcaattgcttgcaattttgaaaggaagggccgctgggctcgcccagtatgcaaagagggaagcatagactcacgtctgattatcgcccttcgggctcaggaaccacgctgctgtcgagagggcgacaatgataaccaggccaattaacaagctccagctgttgaagtttgtgttagcgactatagtcttttatcgagtagagtatccgggggtcggcgcgtggcgggatagatcgaacaatgcgaacacccttaagcaagtaatcatcgatccattgctcgagatagatatgcattgtttatcccatcactccgacagagggaaaacatacccgtttgccattttgtcggtatttgttattatcttcgttcgtcggagtaaagtacagcccaagtggagatcactcggtatgttatgcgattgtcggtgtgggcgaagagcgggcgagctagggaggagaccgcagaggaggcggatcgtttacttgatggtataaattctgcgcacgagtgctcttgaatgtccggatcttttgacagcgcgggtagacggacaagtaatcgattgctcggtgcagcgtggcacgattaggatcgacttgatggtatttcggggacgtgttcaagaaaccaagtatccgggagtccttcttgggaaagacgtagctgttaggtatgttgcgagctaataaaaggcgacctggtgagttggagtatctccgttgatgtcggagctcctggagctagcatgcctgaggcagaattggcgggcggtggaccatacgacatctatacagcaatgaagacatctgttctactccgtacatttccctacaatatgaaatttatgagaatacatataggagcttcttctaggtccaaaaatacagactgaatgatctgttgcttgggctcagctgaagcaaagcggcttaggtacaaaacacaaggccatggctcgggataacagacaaaatcgaagccggacagaaggataacaaaagaaacatggcattcaaaacaacacttaagcaccctcacggatcttgcggtagctggcctaagaaaaaaaaaaacgtggttagatgtgatagacatgtagaaggagcatcaccgagaacttacctcctgctcgacctgcagtgcatctacggttggagcaagctcactgagaatctcatatgatttcttgtggaactcgagctgagcggcgatcagatcggccaggttgcgcaggggctcgggggtatcaaggaccttgttacaagcaatgtgagtaccactggacagatttcagaacacaaacagaagatcaaccagcacttacatttttcataacgctcacagcctcctcagtctggccaacaaactcatcttcggcctgctcgatctccgcgcgggcatcctcgctcaggttatccaggtcgccgtgggcgccggcctttttgctagccttgatggagtcgagcatcaagcgggcattctcaacattcttgcgcgccttagcagcgaacatcaagttagtgttgagggtggtattccagccggctaggaagcgagactggatctgagcatcctgggctagacgagcctcgcccacctgctcctcggctagagcatacttctccaacgcagtggcgagtgggtcttcgccctcggtgctctgtgcgagtgtctgggagccggcaagggaggcacgggcgatcgcgtggttgaaggtcttgggttggggctttgcggaaggcggggctgtcagggcagcttgtgcctcagcaggcgaagctgcctgggacaggagctggactttctcgctgatcgtgcggcccaggtcattgaaggattcgcggatgtttggagggtagtcgtaggcctcattagagtattgggagctgctcgcgagagatggcaccggttagcaccagtgcggagagccatccacagcgcagaaagcaacaggaattactcacgtcacctgcaacagcttctggtggacaagcttgagcgcatcaacgcgcttctcgagctcgatgtattcatcagggagctgggtcttgtcgtcggcctggcccagctgctccttgatcatttgctgagttcgctgcgcaaaaggtgtgaaactcgcactgtccgtcagaaaaccaaaaggcaagaagatgttagcaaagcgaccaagcacaagtcgagggggatggaatgaggtccgcgggataggggggctatgacggtgtactcacctgaagttctttccgaatgcctgcattcgatccatgattggtatatttttaaacgttttagttagaaagaaaaaggaggagagaatggcgagaaacggatgcgtgtgttgatgggatattaccacatgtgctacgcgggcaggatgaagcctcgaccttgcaccgcctcatttacgccacttctcatcaggcactatcaggcaccttcctttttccacctttatactagacattgaaatccatgtcaaatccatgtttcctctaaaagcagccctctgtaagtatcgagtgtttggaatttcaatattgtacttggagatggtctgcaaattgctaaaagatacatagagaacatccggaaatccccattcagaacccagaaccactgagtcaaattaaaatcataacatcgtaactcgctggttcaaaagcaaagcatgaaagcatgaaagcattacgcaaattaggttaggtcagagtggccatcatagcacgcatgatgcgggagttgggttctagagaatgtcagaatcaccgaaggggtatgtatagtaatctgtggcgtcgtacctgagcgctcctgcctccggacctcagtaacctcctcctggttgcctctttcgtcaatgatatctgtttcgcgttgccgagtgatctcaatcccaccctgcctctctatacgaagaagtcttgtctcctcttccagattgcgaatgtactcattcacgtcgtcatcgctgtcccgtggacgaacgacaaccatcgagctcgtacgaggactatccaattcccgctcttcgatgtactcaacgggagacaagatacggggtccgcggtcatggactgatacagctcgtcgccgagagatccctcgcctgcgcggcctctcgacaatctcctcgtactcatctgcatagtggcgtgaccgtgacctgtgtcgggagggtgatgcttccacgatgaatgcctggctcgtgcggggagaagcatcaacacgcaagtgttctgtcgtcacccgctcgcgtgtacgttcccttagcggaggagacggagcaaattcgacatattcggctgttcgaaaaaaaaggccaattagtatgatcttcctcatacacttggggatccggatacgcatgtatatgccactcaccttccacggacggaggccgcctgaactcgcggctcaagctaagaacttcgtcgatttgttccttcgacaatgccttttgaatgacgatcacatcatcctacctaggtcagcagccgacaacagcactatcggaaatcaaacaccaacctcttccttgaacgggtaccctagatccatgatggcgtgaatatgagcaaggtgacgaggaacacgggtcttccctttgcgtgggtaaggtttctcctcatgatgtctgcgaagggtactgctagaccggcggcgacgatcaaccatatctcgctcactgatatctctaaattcttcatcaccatagtagtcgggttcggcgatccttatatcttcgtagacttcccgttcgcgataacggcccggagaggggaggtgacgaggcggagcaacgagaggtacacggggagcgcggggtccaacatctcgggcatcaaagtgttccatattgcgccttggtatgcggtcaaaggtatccaaagacgactgccgcctaagaagttgaggacgactgaatgagggactatcgtcaccgcgccgacgccggtcatgcgccacaagagacatggaaggcggttggtgatctagatggtcatcctcatagagtctcccgggtgcacgagcagggggtccatatcgatcttcctcgtggaggcgtgattcaaagcgctcttcgacatggcggggtcgttcggccacgggggggccccgtgagtatcgatcatatcgatcgcgagagttcagtgtccccgttgacgagcggtagtcatcatagcgagacatctgagaaaacacagcaaggatgaaccgtggatgacgcgagcggctgacttccgtgccgagggtggggtaattcgagtaaccacgggtgaagagagacctcgtgagaatgataggaagagagagaaagatagaaatgagccgagaggcagcaatgaggagagagaaactgaaaacagaaatcaagaatcagccttgggagagaagaagaagtaagataaataaaacgtcaggcagaagtcgatcagtgatgacattgggtcggatgttgattgcatgtggggatacccggacacctatttgcgccacatgtttggacaaagtacgggcactactgtatgatgcgactgtatgttgcgcttcatgtatgtactatgtatgtagacacggatgcattgtgtagttgatccaatcctaaagctccaaattcgcaatgtcctcttccaagatgcccatagcccaatgcgctcggtccgacttgactggcacaaaccgacgatcttttacctcatgcagcaccgcctcagactgtggcgcatacattagcttggatgttgagggccaaggatatccaatagatgtactcacctgacgctcctgttccctttcccgatctcggtcagtcttgaatgactgttgatagggtggcccacggccttgcttggcagcggctatccaagctttctcacagccaccggcgatagcgtctgcgctcttccacccggtcaggcgggagatgtcacgaagtgttgaaatcgtccaagctcgctgcgtgggatcactatattgcacagctgcgaagaatagcggcaccgacatgtcagtcaacgaagagcccagattcggattcaagcttccggcttcgaggttaaaacgttgcgggtagtagacacccgccagaatcttcccaacaatctgcgaaaattcagctgtcgtgggagcagagactccagctgcgaccatgatagccggtggcatagaaggatgaatccggttcagcagcaggcgcatggcataatagaacccccagatcacggcgatggtatgggtacggtattggagggcaggaccgaacggtgtagatattgggggcgcgacgtctgttggtaaaggctggaaatcgcggcccagcgcttggtatagtatttccatggcgacgaggatctcttcccattcttgttcggcttcgttgtaactcacgtcgtgagcggggtcatcctcgtccggtgacaaacgaggctcacgcggtgtatcttcgaatccccggggaagacgtgcaggcggttgagggggtatcattccgtacatggggggactaggggccgaggtcgatccagggcttgaagaaggagacatctcagtaggtgggccaggtggagggccaggtggagggccaggtggacggccaggtggaccccctggaccgagtccgccagatgagccaggtctttggccgggagggccgccagcgaaccgacccatgaatttaaacatcccaggacctggcctccagttcaccccgcctgccttcagggttctcaattttcgcttacggtcacggaagccaaagtctgtgacccgagcgagcagcagccacagatgatctgcggagccgtatatggcatctaaacggccaatacctgctcgaggtgggcattggccccattgagagtaaggcattctggtttaccgatgagaaaatcgcctgtctagtagccaaaggtgtagacttacaataatttgtttccgccgataaaactctggaatgcatcttgcttcgcgtaccaccagtatagatcgcattgaatccggaaaacctcaatgtccttgcgggtgaaatgcttcttggagggcagcgtaccctcttcattgatacctccaaaatcgtcgtaattcactgcttgtcccataatggcgcctatgagatcttcgtcgatgctttcctctttctcggagaagggatcgtcttcagagacaccagacagcccccaccacgagttcgaccagcctgactggcgtcgctgctcgtgagatctacgtcgataggcccgtaggtctctcgtggtcttggcgaaatcgatctctcggatcaaatgggtggacccacccaggtggttattccatttcgagtggtcggcagatatcacctcatagtagcccagtagaagagtggcagccaaggtaccgacttgtttgcgtcggagaggaagaccaactgcggaactaactcgtttcagggcgtagtgatagtgcttcaaagatactgtcgtgggagcttgctgtaaataggcaatgtgtaagctgctgacagccagtattgcctgtaggagagctggatgctctaaagctttgagggcaagcgtatagacccatagaccctgctgtgcagatgggacagccgctcccagaacaattgaggagtcagtaggatgccgttcaaatatagacaaggatggaccagtcgaatgaatgaagtgagcaaagatgcgggcagtctttgggttgttcagcggagaagagccaagtgtaggacggtatgaggcaagcacattgggctcgttcaggtgagtcgtgaaggatcgaagttgttgctcgtcgcggttagcagaggccataatgagactcagctggttgaagccttcggcctgcgattgatccaccatctcatcatccgagtccacgtcgtagtaatcctcgctttcatcctccatgtatatcatttgttgttgatggggtatttgatagggtatatattgctcatgagatcgtaattgctgcggtaattgccccagcggtggctgataatgatatatcgtcggtagcggctgggtcatctaagaaatcgtactcagcataccagttgctaaagacagagataatgacaatacatacctgaggaactaggttggtctcgctctccctccttccatgcatcgagctggaagctagcatgggcgagagattggaggcgtattcttcagctgtctggccgatcggactggcgatctggggtacattttgtacgcttgcatgggaagtatgtagagcgcttgtctggtctaactgaactgattgctgtccttgcgagaagtcagtcacatttggcggaactagcgtgttttccgtttgagctatcggctggatgtgccacatatggctcggtggctgcacatgagctggataatagaaggagggtgtattaatgggctgtagttgagccgacgaatgcatttgggacggaaatgagggatatcccatcacggctggatcagcaggtcgaggggctagcattggatgctgagcagcagctgccgcttgttggggagggagttcagagccatagtcgttgggcatcggccccctcatatgttgttggtctatctgcaaatcgtggctgtggccattattgaatgatccgaagaggcctatggggttcttgaacacgacccgctgggcatatccctcgcagattcgcttggatttcacgcagttggtacatattggcttctcttcgccgcacttaatccggcgctttcgacaagctatgcttcgtcaatgagggaaccctatcaccagtgttctgcaacatactcaaacagccagtcttggttcgttttttcgggagtctgcggggaccttgtccggttgaggttcccgcagaaccgccaacagtaagatctgctggaatatccagctgatccttcaggtcgtcagccataaccttggaaggactcaagattgcggagtggacatgtgcgaggacattgtggggctaaaagacacaataatcagataagtaagaaacagagctaggagggaaaagctgccgagcaacgcagatcacccgcgatacaatgtggttcatcaaggggggatatacatatttgcaaggttgctcttaacacggtcagactgctaagtgtccacggatattgacatttataattacaacttacgagacgcttaggggcgtacaacgttgtctttgtggcccaagaaagtcacactatcggcatacatcagtgcctgaggcaccaatgtgtatgtaatctgatagtaaaattaccgataacgaaattttgagagtttttttttggaggtaccgtttcccctaccttaaaaggcattggacatttacaaccaatccttcggaactaactatgttcgctgttccaggatggtccgtggagagctctgctctgaagtcacagactcaagccgcacagcctaagaacgactctcagccggagaagaatgcctccaacgatgcgaagaacaataaacgcaagcgtgccaatgaccgtatcactgcgggaaatgtggatgagatgtaccgtagacacatcgagggtaccttcaggagtggaaagcatggtgcagatgattctgtgaagccagagaagaagcagaacaaggaaaagaaacagaaacagacacttgagactgccacccaggagactacaagtgaaactgccaccaccgccgatgccgatgccgatgcagatcaagccgaggataaagcacccaagaagaagcaaaggaggaacaggaagaacaaggacaacaaggacaacgcagaggacaagatcgaggcagacggcgctaccactaccccagctaaagaagctcctgccgctgctcctgctcctgctcccgctgcacccgcactcccaccaacatcgaacctgactcctctccagcaggcgatgcgacaaaagctgatctcctctcggttccgccacctgaacgaaactctctacaccaccccctccgcgaaagcacttgaaatgttcagtaccaacccggagctgttcgacgagtatcatgccggattcgcacgacaggtgaaagagtcctggccctccaacccggtcgatgactacatcaagactatccgcacccgcggtgcaatccccctcccaaggcgaggaaatcccattaaccctgctaagggctacccgctccctcgtcgtcctactggactatgcacattcgccgatctgggctgcggtgatgcacaacttgcgcgcgccttgacgccctccgccaagaagctgaaaatcaagcttaacagctacgatctagcagcgcccgatccactgatcaccaaagccgatatctcgaatcttcctttggaagatggggcggcggatgtggctattttctgtctaagtctgatgggaaccaactgggtttcgttcgtcgaggaggcatggcgtattttgcgtggtgatggcaagggcgagtgctgggtcagtgaggtcaaaagtcgatttggaaaggtccaacgcaagaagtctcagatcggtgcgatgaagcccggcagcaaggcagacaagaagaagcccaagaagaagggcggcgccgattctgatgacgatgaggctgatatttttgctgaggatgcgcgaccgtctgacaatagcgatgagactgatatctcggcgtttgtggaggtgttccggtctcgtgggttcatgcttcgccaggaatccgtggataagtccaataagatgttcgtgagaatggtgtttgttaagcagggtggtgcgcctaccaagggtaaacacgcttcggctctcactgcgcctgcccctggtaacaagaagcgctttgtcgaccgcaagcctgattcagagtctggcatgtcggccgaacaggaagcccaggtgctgaagccttgtgtttataagatccgctagacgttgcaccggatctttttatatgtcattgtacataaccaaaatctaccacacatgaccactatgtttgtggatcatatcccgaatgcaacatacgacgtagttagaccagcatgtaagcgttggatggcatcgtcattatttttctattgctcccgacataaatactagcctccaaatcaagtccaaggagcctcttcgaagatatcttagacactgatcgcccttattggttcccaccgagctgtgtgacagcttggcccatctcctcatcgttgtagatacggaaacccttctccttggtgacactggccaactggacgttcttggaatcaagcttctcctccatgacctgcttcagtgtcttgagtaccaacgtctcggcctctgctagagtcaaagaccgatgatattcattctgcagctccgcctgcgcaccttcgcttcccgagccgatggccttggcatcataccggtagaatgtgccggacggttcagcgtggtatctagcagaaaagatgagtcagtgaatatatcatacaaaagaaagctgcatatcttacagttggggcccgtcctcgtcataaccagcgattaacagcgcaacaccaaacggtctgctcatgacactctcctcgtcatcaccgctctcaccaaatcgcagagccaaatcgcaaattgcctgcgtagtgctctcgacccgcagaggctcggcatagtggaaggcgtggttttggcactcgactcgggcgtgctcgactaggttgcgggcatcggcttgcagaccggacatggcacagccgatgtgctggtcaatttcaacgatcttctcgacggacgacgcttcgagcagcgtggatgtgacgcgcttctcaacaccgagaatcacgccctcggaggttgctacctagatgagtattagaaaaaacggtttcataatcgcattatcctgggtcttgcgctccgataacagtacaaagatcactcggtgtagtggtttgaggactttcttgaaatcgtagagcaaagaggaactgagttgtatgacatactccgatcgcggtggagcctagtttgatagcttcaagagagtattcgacctggaacaaacgaccttcgggggagaaggtgctgcggaggggacattgtcagactgcgggtcggtataagagcgcggattgttatcggagaacgtacttgattccacggtctgtccatagctgttagttgattccgcggtgaggggagaccctgatgaagcttaccatattctgatcgtgcaatgaacatattggattatctgatgggatgggagagacttgtcaaaaagagaagcaatgaagcaatatagaatcacgatggaggagataatcagttggaacgaaagaggagcagaggtggatgtcttaagtgaagctcgggaagggaagctctcgacgtacgcaagaggtgaggtgcctggttgatgcctttgtgcctgaggcaattatcggcccaaaccaaatgtggagttgtttggatacttgcatcttctcctcatatacattggttctgctatttttgttgctgatttttcgatctcgcgcctttcagtcgcctatgctgcatgattcaattgtcgccctcgcgggattatgtctgccaatgaccgcgccgcgtatatgaacgcttcacgaccccgcgcggtctccaatcgcgtcgattccgaaactcgcggagcatcgccgttacagatcgagaataaggatcccttgcgccgcagcagctcaaatcaaaaacacagagcatcccgagatcagaagagcatggccgataagcgctcagaacgcatggtaatcacatcacgggaaagggcagtgcgaaggaaccctgtgaaccctgttaaggaatctatcaatgcggctagcaggggcgattgggataaaactcggcccaggaagcctgtccaacttgatgacgggaattccagtttccgaactggggagaaagacctggctgattgtgagtgctgcgtcgcagtttctcgtggagtgcaatggatttgctgaccatgatttttctctttacagcaccatggaatccccaagcatcattgattcctcactcgacagctcccctcgcatgtcgtgtatcagttcctcctctagcttcgacggctccgcaggcccttcatcctcggccacttcgagagctctcacccgatgcccaggaggcggcgatcttggaagacttgttgttcgtgttcatgggattcgaaggtcaatatgttcactacgctagctcatacgacccatcaatcgagaaagaccgcctcacgggcccgatcttccagatagccccaggcctggacccgaccctccgtgatctcatccagtccatgttgaaaatggctactcactacagtgccatggaggcatttgtggaaattcaaagtcgcgctgagtgtggtgctgtcagtcactcactatgcgcatctattcgaaagctcctcaaagattacctgatccttatcgcccagctcgaaggccagctgctgaacaatcctacatttaccttacaccttctccatctctacacaatgcctaccagtcaatgtttatctcaattatattcgatgggccaggaactgttgctcaaaaatggtcttctagatgaggagctcgaggagtcgactgatgacttcgatgaggatgttgacaatatacttgaacaactcaaagaagggggggacttagtgccaggttctatggcccgcaagaaaatgtgcaaaggaggcaatattctcggactcctaacagggcgtctggcttcattctcgggtgatccgatcactaaaaccttgcttcagaccttactgcgtgacgccagtcggccttacatggctatgctaaacgaatggttgcaccatggcggtattagagatccccatgccgagttcttggtcaaggaacaaaaatggatcaaacgcgagaaactcgaggaagactacacggatgaatattgggagaaacgctacacgattcgagagaacgaggttcctcctcagctgaagagcgtgcaggataaagttctgctggctggaaagtatctcaacgtggtgcgtgaatgtggtggtgtcgacgtcagcaaagaggtcaaagatgtaccgaagacgctcgacgatccacgcttcttggacaacgtaaattctgcctacacctatgccaatgcttccctgttaaatcttcttgtcacaaaaaactccctcactactcgattccgctccctgaaacattacttcttcctcgatcgctctgattttttttcctacttcctcgagcttggtgcttccgagctacgaaaaccggcacgtgccgtcaacgaagggaagctgcagtcactgttggatattgtccttcgacagcctggcagcgttgcagcactggacccgttcaaggaggatgtcaaggtgcggatgaacaagatcggcctcacgaaatggttgatgcaggttgtgaatgtttcaggcgtcaaccaagagggcgcggaagcggagaagcaacaaggttctgctgtccattccgctgatgaggacaaagatattcttggattcgatgcgcttgagctggactattcagttccattccccctatcactggtaattagccgtaaaaccgttctgcggtaccaacttattttccgccatcttctctcgctgcgccatctcgagacgttgttggtcacgtcctgggcagaccagaacaaaaccatcagctggcggcataaatcctccgatcgacggcttgaaatatggaaacggcgggcgtggaacttgcgcgcgaagatgttggtgtttgttcagcagcttttgtacttttgcacggctgaggtcattgagcccaattgggtgggtctgatggatcgtgtcaacagcgttgacgccgacgcgtcggaggtggaggaaaattatatgaagcaggtcaatcgaacggttgatgagctgatgcaagatcatgtggatttcttggatacctgtttgaaggagtgcatgctcacacaggctaaactgttgaaggtacgtttatccatgcaggcggtggtattcatactaatagctatatagatccattcgaaactggtgacttgctgcaccatgtttgcttcctggactgcggcatcactttcacgcgccttggcttcagccgatcctgacttggctggaggaaaagtccctggcgctgatgccagaggatatgatccaacgcggattggaaaactcgaggacacactgaaacgatacgaggaccatttctcgcgccatctccgcattttgatggacaggtgagttacacccttaagaaatacatctggttatgtgttctaacacgactatacagcttgaactacttcgccgcaacggagagtgtggtgctcctgaagcttgcacattctttgacctctattagccgagaggagagtaaagaggattgaaagcttgcaatgccttgctccgtgtctttcacaccttgatatcattatccccatatcaacccccgacagagatgcggttgagtgctctggttatgggcacaagaagcaaagcgcttcagacccataatgcttgctcgctgccgcctagaacttggtgatgccgagacatatgccacggacttcggattgtggattttcgaactccgcagaattgagacattcaccggactctcccagacaagtccaaatgggctgtatcacactctatcaagcctcgtctgtgggttcgtggaaacccagatcactgtacttagagccatgaaccgagtcacaccagacatcgggattaatgataatacgagtagcatttcggaacgaaacccggacttacagcgtgaagtgaagtgtataacgaaatctcccaaatgacggagcccgcaaattcctcgggatcgcgtcagcaagcggcttctcacgtcagccggatttggccatccaagaccgtcagggttcttattatttaatttcaatggaatctctgagatatttgtaaccaaagagaaataattaaacacctacgggactccaacaaagccgatcgacgcaaacaccacaaacatgccaataaccaccctcacctccgtcctccgcatcccattcccgcaccccaacacagcacaagaccgcctaactttggccctcggcgccacagcgctagtcctctcgaccctcgtcctccccgccgcctaccgcgactacaaaatcttcaaatcctacggaccgggcgggccaccgaacaacgcgctaggatgggtaatcgtgcgcgcgctgttccagccattcgggcgcgaaatgttcagcacggacgagtacgtgaaacgcgttgcggcagccgatggccacgggaagggcgatgatgggtttctgtttttgtccgaggagcaactggggagtcgacggggggaagagaggcctgttgttggaccgcacgttgcaccgcagaggcagttgacgcaggtaccagataatgctgttatggaggtatgttgcgtgccccctttttttgatcagaaaagagaaggcgagggatgaagagctacttgctgattatgctcttgtgtgatagaaattccgtgctgtgttcagcgccttcggacatcggaaccatcacctcgtgaaattccaaaagtccaatctggaacgccatgctgatgggctctttgtcgcggatcatcttcctgtattcggaattgcgaaaactatggagcgggagattgcacatgttcatactggaaatgaccactcggttcatgtgattcttgcgccagctgattgtatgattttctcgattcattcatttgttcgcgtgctaacattccttaggtatcaaggttatcgaggctggttggggccagcgtcatgctttctcgggtacatctgcgatctcgtttctttcgcttggtacaaggcctgatatcccggtggagtatgttttgatatatgcgccgcggacggaagcggagattgagacggttatgcagattatctcagcgggtgtcgagtttatgacggggagagaggatgtgcggtaggtcaacgagtgttttttggactgatcgtatacttgaagggagtaatggtggtgttctaaggtggatgcattcttcttccggtgtatgggttgtgcttggtttcttcctgttctctgtctagctttatataccctcactcttcgatttatagaaattcatgctgtttatatgagcatgtggcagcgccattgcttttaattgagactagtacattctgctgttggtgatgcatgtataagctgatgcctcaactctctctatggtatactcactccagcccaagagtgacctgcaataatgtaccttctttgccctggatgagtgctgacttagagaactaaaggtgaacacgttctttcccttttgatataatctaacctttctcatggcctatctagcttctatacaatttctcaatgtacatggtgcaaatagaaaacggaatcccccgcctctccacttttgcaagctagtagtagataaccatgtaaggcctctttgcttctgcattcgaggcgtttagaattaatcattggggcgaatgccctggaatggctctatggatatggcattgtatcatctactattgttattttggtggtaggagtatctggatatatatttgtcatatttgttatgtacactatagttatgattagatagtgaatattatgtgtagttctataccgaggaatctgccgaccgtcatgcgatattaggactatatttaacgtttttctctcctctgtgctagtatcttaaatagtaccacggcgacgcctctacccaagtggatctatagcgcgattgcacgcatatggctagtggaaccgagggagtggtcaagttcgtatttagtaggtaagaaaatacacatatccacccagcaaatgagactacgaatgataattatcttttctttcattttactactccatacgtatcattgtaaaaggaaatgtgcttggcggttgtcatgcccaatttagaatggggcaatgaacccgctaggagcaattccaaaattacccgttatttcccgacttacatccgacgtaggttccgatactttttttggggtttcggaaaaaggaaataggggggacctttgaagtacaggaatgatattgatctaagagctcccccaggttgaagccgaaaaagttagtaggtggctcccttacccgagagatgaaccatggcgctgggttttgagccaacggcggagccggacgggtaagcccttgtcgaaatcccgacagtatggatcttcgtatattgtactttgtatatgtaggaatctttcttccttgcttcgacctgaagagtctttttgacacgaacttaaatagtgctcggaccacatattcttgtatggacccgaggtataagcggcacttgcatggaagtaacgcgttgacatgtcgtcatgtaactcagtgttatgtgagaaataaccacatgcaagtcttcggaatataccccacgaccgcaactgcaactacaacatacgaaccttgcctttgttatggaccgttgctgctgccatgtgggacccgatcgcctcggataattgacctagagtgaagaaaagctagcagtacctgcacttaggcattaggccagttgaaaataatttcgaagatgttttctctcggtgaactcggacaccgaagtggatattgccgacgttgttgtgttgtgttgtatgttgtatgctgtaatgtaatattgcatactccgtatcttctcctaaaggcaacaaatatccacacacgggatgggtatctttcccgctgcccatcactcgctttgcaccaaggcaaacaaggtgaacgggtgaagaatccagaagagggcaacggtaatatcgatcccttgcctcggaggtacttctgtcatattgttctgcagaatctggagacgggctaaaaaatccctgtagcaaatctccatagtgtccgccacccgggccaacaacgttgcaatcttgaaacgcaaagcctccagacaagcggtgagagcgagagtgaaataagaggggcaggaataaaatcaataaaatccagtgtccagcccatctgaatcccgagggaatggatgccataacgaggaagttgctgatctcgtctgtcgaaccccactcaatttgaggggctgttgttggggcaatttggggcgtgagattggactgaaccagccactttacacccacagtactgcacattgggccaaggacacggggcgtggcgagtgtcagaaacccgtcaagccgttcgatccaactgttggattccttgtttgcattccttcacttaagtgacagcgggaaccgacggtgatccgtttccatgcctttggaatccgtgatgtagggctcatttggcctgtacaaagtacatacgcaagggctggtgtgaactccgatcccacgggcttttctttttgtccttgttctcagtcggctctctcagagccaattcctaaaccttttgttctccgtatggtgtctcatgtcgcactgcggctgtgttgtcattgtttcaacctaacgacgaattgttgcatagtttgcttcaatcgatgggtggctttttttttcattcttcaccgagttcttgttacattcttcgctagtcaacccctagagacccatggaatcatggcgagcagcctgagcaaggtgcgattcaactttctgtagactcgaagtttccaaggttaaccgctcatgacagccgcggaattacccacatattacccaccatgtttagcaatgcaacgattctttgacggcatggagatcccagtcttatgggtttagttgtggccggatttgtactcgatccacatcgtcgggcgctcttggaccctccaggaaagtaggtactatgcgagacggcgaactgtgcattagttgacggcaccgccacctagtttcaaggttcgttagcttggctttgagcggaaccaagtcatgtctattctgatacttacctattctggtgtcaatagtccgggattattcgtgaactcttcggctagtctaccgacccgcattttttttctttcgtcaagccttgttgacgtaccagtgtcccggagcagcaacaagagcctcccgtgaagatgtctcacgccatgtttagtagttccgctagcaaggatgtgtgttttggagttggccccaaggaacgacatgaacgatccggaggggagttgggagtccgcattgatcgtatttggttacccatgcaggacccatccgtgccaaatcttcgcccgttaagcacctcgtgtcttcacaaatccagtattgcatctggtgtgatctttaaaagaggaaattcgattgggtggaccgctggccctcccatccgcacaatttggtacgtcccttgtataattagaagcccctccattcagccttcgcgagcagacgcccaagagcgaataatcctcgcgcgagccgccatcctctccgagggtaccgccgacgtcttcaagcggcacccgatcgctccaatgaaaaccccagcacatcaatgatcaaatctcactcctttttcggatattgtgattcgaagcaagatcttgtcctcgggcaattcaaccccgccttggccagacaaatcaggatatatcagctcggatttttccatcatccacaacaccactcgattcagggtgacgatggcgtatgctagttctctccgttctttcgggccaagggcaactgacgttcatggccgccaggagtcccgattctgaaacgatagagttagaccgtgaatacctcgatacggtcacagtccagggccgtgagtatcagaaatattcgatcgatcatcgtacgtactttggaccggtcgatgaggtaagtcgtccagatttatgtcgtgggcttctcactgataggctgaaccaggaagaagcacaacgactcgaagaccagcaacaagttttccaaagaattttcgataatcgtttgatcttccccccaatccatcgactgaaaagagttctggactgtggacatggatccgcatcctgggctgtggatgttgctgagcaaaaccctgactgtgaagtaagatgtccccttgactgcgcccgacgacatcctaatatttggtgtttcataggtcatcggcgtagacattgcccctcacatgagtccagacgacatgcctgacaacttatggctccaggtaagtcaacctcacatttcaccacggggtacggtgtggtttacatcatgaaaaggcttgacactgcctttgactcatgactttgtgcttcgggacctctgtgtgatctgtcaatcttgaacaacagttctgtccaaatgtgtaacctcctgaaagacattcgctgacttgtgccgaataggtcgatgacttgaaccgccgtttcacctttcctgcaaaccatttcgatcttgtccactctagactccttgcgaccggtatcaaccgatcgcgatggccatcctatcttcttgacatagtcaggtgcgaatactccagagcaggttgaccttgccgacattccaagaggcagaatttctccaactgagataccaagactaacgtcagcggtaatcaagggtactgaagccaggaggctgggtccaaatggtggaaatatacttcaatgttcaatcagacaacggctcaatcactgatgagcatgctttgaggagatggagcacaaaatacatgcgtgctctggaggacaggaaagatcttcggatcggatcgaagctgaggactcttatgaccgaggcggggttcgtcgaggtagacacgaagatgattcctcttcctctgtctgcgtggtcgactggtcggtattggctacccaagaagaacgaataagactgattgaatcaatgcagaccaacggatgcgagaaatcggccgatacaattgtccgaacatgcagcaacttctgcgatcacttgcactatatccattgactcaacgcttgcatatgtctccagatgctttcaattctttggtggaccaagcgcagcaagaagcagcagaccccacactgaaggcatatttcccactgtaggtattgctccaatatgaaactgagagacaaattctgacagagtaggtatgtttgcattggcaggaagccatgaagacatctgtctggggagatcggcaggtgcaatggctcataaaagcaacctctggcggaagggggaaaaatgctcgcaagacaactgggccggttatcgatgccacccctcacccagcatatcgtacagctttggttattttgctgtgcgcatcctgcattaacatgtcgcattagcggaaagatggttagttgaatgagtgttttctaattccacctgttctttccttttgccgtttgtaatgcaacggggattcgtatcaataaccgtcgctgtatgctggctgaagtccagcggagagcttgagaatctcggtatgattcatcgaaagaggactgcatggtcgcacaagaacgagtgagacgactccacggcgagtggagtgagagaaagctcgtagtccaccgtggtttctgcgggaagccaacaattcgcacatgcatcgagtcttggctttaagagcctcgtatccactcgatatcggtgttggggtactgcccaacgcggtgggaaagcgaaggtgtattggatggaacacggggtcgaggcatcgctaccgctgcctagggtaagttgagcttttagttgactgctcccaggcaaaatgggagtgaaacgaaacaggagagggttttgagcaggaggcctgggggtgcagattaagctgttgagatcgtgcctagtgcgggatacccgacaccgttggctcccgatccgaccttaccctttagagaagggggttttcgacctccttacactccaaaagatacacccgatcagcaaagtttgtcacgacaaaagatgaagaacatagaggaagatgaaacaggaggggacttaccgaactgacgggagagccagggaaccaccgacttccaggaacacatgatttacacccatctcagacagtatatacggtttgactgacctcaatatcaatactagctgttaaaaatgtccataccgacttgacaattagacagcttcgcgccgtcacgccatcacgctctcaggccttcggagcagactctcatgttgagagtgataaccctgggcgacgagctccctcaagccttaatgaacatccacaacatccgttacacattaaagagctatcaatcttgtgtcttaccgatattctcaatggccgcaggagctcttataaccaacaccctcttcaccgtgtttcccgtacggatgtacccaatcataacctccaagcaaccaacaactaggaatctaagctgcatatcgggatctaactagcgctgaatccttgctgatttgttgagttccttctttccttactcgcgaagcggccatgtcgccctcttagcttcttattagagttcctcccggatgcccctggcgacgctagctcgaggagttgcggtatgttgattgccggaaagacccacagaagctcgaaatgcataagctacattctcttctcttcatgagtgtgttggggagccttgaggcgactattgggcacagatctaccgagaatcttacctatcgcagtccttccaagattctgattggtctcctccaggggctctaaggccaaatcaaccatgaaggggagaatccagactagacagcttgcagtttcgattagtaccatcaactagggaatattggtgcttggaaagactgtactagtcgatttatgccgaagacttttcttttgtctgatattcttttgtttgtctttcctgtacggagtacctgagaccaaattacccctactatatgccgataatgagtgaccaccaacttaaactactcttaaccatcgttgtaatccttatacatactccgtacgcagcagaaattagcgtacagctagctaagaggaagatactcaggcttggccccgatctagatgtgttggtgcctgaacttcaaggcatgaaatcctacccaatcggggaaagcggggagaaaaaaaagttggcgcggattttcatttgagctccggaacagtcgcccattctttttcctatcaagtcaccaccaacaagatgccttcaacacacaataaggaaaaggcctgggatacggatgacatcgataagtggaaggtaagtccaaagctgtccttcttcgattaaaaaatcgctactgacggatcctcgcaacagatcgaagaattcaaacccgaacacaatgccggaggcagtttcgccgaggagtcatccttcatgacactattccccaaataccgtgaacagtacttgaaggaagcatggccggtgatcacacgagcgctggagaagcagggcatcgcctgcacactggatttggtcgagggtagcatgacagtgaagacgacgcgaaagacctacgacccagcagcgatcatcaaatcccgggatctgatcaagctgcttgcacgaagcgtacccgtgacacaagcgatgaagatcctcgaagacggcgtggcatgcgacgtgatcaagatccgcaaccaggtgcggaacaaagagcgattcgtgaagcggcgacagcgcattctcggcccgaacggttcaaccctcaaagcgctcgagctgctcaccggcacatacatcctggtgcagggtaacaccgtggctgtgatgggtccgttcaagggactgaaggaggtgcgacgcattatcgacgactgtatggcgaacatccacccgatctaccacatcaaggagttgatgatcaagcgtgagctcgccaaggacccgacgctggcggaagagtcctgggaccggtttttgcctaacttcaagaaacgcacgctgtccaagcgccatgtgccattcaagatcaccgacaaggagaagaagacgtacacgccgttcccccctgcgccggagaagagcaaggtcgatttacagatcgagtctggagagtacttcttgtcaaaggaggccaaggagcgcgttcacaaggaggaggttgtcgagcgacagcgtctcaagcgggacgagaagatgcgcgagcgcgagaaggatttcgtggcgcccgaggaggtgacgccggccgatctcgaggaaaagaagaagaagaaggagaagaaggaaaagaaagagaagaaggaaaagaaggaaaagagcaagcggaaacgcgaggccgaggaggatgtcgacgccgacgaggctgccgagcgcaaagagaagaagaaaaagaagaagagcaagtccaaggaagtctcttccgatggggaatgatctgctctttgattgtggtatcggtatcttgtatcggaattggcgcttatggcagtgcataggtctggcgtttaaatgtcttgtctcctggttcttcgttgcaacgttgcaacccgtgtacgcagctggtgtgtacatttacaaaaaatattgttcaataccaagaaatgatttagtctacgcacactgtcggaatgataattctgtaaaaagcatagacctattcatcggaaaacgacagatgtggctagtctagccttggtattctcttagggctgatggccgttgaaacgatgaggtccgtcctctgtatgtctttctatgaatcgtgatatcaatgattgtcgtgtatgaatgtcctctttcccatctatttgccaatgcaattgtgcatgtatcccaaaaggtatcggagtatctccaaaaaccgcagtgtctatatagacaaaaaccagaaaaggtcaaccgcccataacagatctgaagacagtagttcagactgccgcggaagtctcgtcatcagaggacgaggcgctggcattcaggcgacgcagcttatccgacaagaacctctgctgctcttcctggctcttctttaaatcaacaccccagaacagaatcaaaaagctggcaacgctcaacccaaacaagaagtagaatggcaacgagacattacccgacgggctcgcgtcgataattgcacttgagacgatgggtccaataaaagatgaggttttaccgatgatgctgaagagactgaagaataggaactcgtgaccgcggggtgtaacctctgaaatcataatttgcgagtagctgtaccagggacagatgaaaaggccgtagaacgcttggtagacctataatcaatcagtcagatattacgcatcatatggcagagcgggattgacatacccagacttcccatgcatgatggaagccgaacctctgggtccagataccgatcatgccccagccatcaagtaggatgattccaacggcgacggcgttgaacatagttttggttccgagcctgaagcgttgctggattgtccagaatgcgtatatgccagcaccctaagagagatttgtcagtttggaacaatttcgctcgcggaattagactcacctgtgcagcaatgccaacaataagcaggtatgtcagttccagagtattatacgaaacgatgctgttctgcaaagttccaataacagtcacagtggtgttgagagagtctccaagtaagaaataacctattgccaccgttagccccgtataatcacagagatagtaggataaaaagtcttaccaactagatagcacagactctgctttaaatgccagatctgcttcatagcatgccacagctgccacatgcctgcaacaaagatcgaccgtttgccagggtcttgacccggacggcgtttctcaagaataaaccacggaatcgagacgagcaaccacacaccagagacgaatgcgatcagcacactcactccccagttgttattagtctcgctatcattgaccttcaacccgaacatgatgcccacgataatggccaagataaagatctctccaacggactgaacatagaaagcgacattggcaagtttgctgcgcatcatggtgtccgcatagtcatattcctcccgagtgatgctcccggccacatatttgtcggcctcttccttcaattcgatggagttgcgcgctaagcccgggaacgcagcggtccagaaagtgagcgtggtttgataggcgatcaagcctaccatgtatagacccacgccgatacgccacttatccggggtatggacacccaaccagccgaagccaatgccccaggcaataatcgacagcgcaatcaagatgttgggtcgccagtaaccgaaatcggcgaaactgccgattatgaggaacaccacgacttggatggcgaacgagattccattggagaggagcacgatgctgttgacattacgtggtctaccgagaaagtcgagtagtccatcggcagggactgcctgggagagcaagttttgaaaagcagtcggtgcgaagtctagaacggggtcagctcctgcctcaatattagattgggaacgcggatagacccactgaatagtgacaagccattatttccaatgtaatagctgcaatcgtggtttagtttccacacagggtcaattcaacaagccacgcacgcataataagcccagatttccgtccgggtcgtgcgatatctctcgtcaaatacatccggtgcaatcgggtcgtcgatcttgttttggggaagaccatccacctccacagtggaatggatattgtctttctgttgatccatgactgagaaagataaaaggtaaaaaggacaaagaaagaaagaagaaaaaaaaagcgacggaattggacgggttaaatgaaaggcctacaaagtcgccccgcgtgctaaagccatcttgagatgaaccagttgcattgcaattacagtgccgatcacgataacctggatttagtaggctggactatatcgcgtcgggtctagttagggctatcacttgcagagacttgaaaaaagttccggcctctccggtcttgaagtgcttgactactttatctcgtcctatcagatcgtcggattttgcatcttccgcatttggtgggttaggtgggtttggtgggattcggtggcttcgcgaacggacatcgaatgtctcagcgccgatattagggcaggcaatgactagctacggtgtgggagtgagaatattgttctctgcatccgggcagtcgctagatatcgaaggattgaagctacaacataaaatggcgtggagcccgagtgaatgggcttgagaataaggttgtcggtgtaaattgtatggatacgaggagttaagaggctagctgaaacataactggacagtggcggtgggctcatatcccatcaacagtccaacttcaacctcgcgcgtcatatatgagtagaaccttggaactacgatatctcgtcactaagcgaagaaaacagccctaggctagatggactcagacctaaaatgtcgggagataagacttggaattgttacttttaatataaaccatgttataacctcagaagtataattctagacaggagtaaacaaaagcaaaaaaaaatattacataaaaccagccgatcaccgaccatcaaatgacagactatagtataggtgagtgagtatcattcaaccaatcactccgaatcgcccaaggaaaacgacacgcttagaaagtgaaagcgagagcgagagcagcaaccagggcaccagcagcagagccggcgacacgggtagcagagctgacggggacgctcgaggaggcagcggcagagtcggaggaagaggagctggaaccagatcctgagccggacttgctgccaccagtggcagaagcggcggatccagaggcagtgcgagaggcgaatccagcggaagcgctcttggacttaggcttggtggagggacgggcaccgatggtcacaccaggggcggaggcactgacggaggaggcagcaggagaagagccggaggcagaggcaccagagccggagccagagccagagttggaaccggagccggagccggagctagagccagagccggagctggaaccagagccagagctggagccggagccggagccagtggcagaagcaccggagctggagccagagccagagccagagccagcggtagtggtggaggcaccggcggtagcagtcttgccagcggccgaggtggaggaagcaacagcagagctggaagatgtggaggccttgcagctcaggtcgtacagaggggtggtgtcggtggatgaaccagtgacaccgaagctaggggcggtagtaccggcatcctcgagaatgtaccaccaggtgttggtgttgcccaacagggggcaagcaacctcgtcccagtactgcttggcgttggcgacgctggcgacagcgaggttctcggtagaaccggtagtgggccagccggtctcggtgatccagatctccttaccgccggcaacagccttggtcttctcaacgcccttgttgaagagggacttggcgtcgtcaatggagttggggtcggtgttctcgtagtaggggtatccatcgaaaccgagccaatcaacggcctcaatgacggcagagttagagctgttggtccaggagttccaggtgtcgacgtggccaatgggggcaccgctcaaggaagtgccggagatggcggagcggacctgggtgatgtagtcgacaagctcgtcggggtcgacaccgagaccagcgttggccttgacaccggtgacggagttacggtaaagatcctcactgccgacggagataccgacgaccaggtctgtgaagtcatcgccgtaggtgctgatggcagatgtgagggcagcaatctcgttgctcatgtcaccgccggaagcccagagacccaggagaagggtggtcttctccttgatagcggcgggaatggctgagataggagtgttggttgtgtcaccctggatcatggtgtacagacgggcactggtgaaggcgttgtcggttccaacgaggttcttggcagttgtaaactcggtctcaaagtcggattgggtcttgacgctgccatcaaccttggtggagccgtagttgaaaccctgagagatggcgtcggaggtagcgacagccatcgcgagggcaaagaattgagcggaacgcatcttgaatgattgaaaaacgagtgttgatatgggagtaagtgaaagagaaagagaggaagaatatatgagaagaacctggattaaaggagtgcaaccagggaagttctgtacagttaagatgaaggtagaagtggaagaagaagtgaaagtgggaaatgcaaacggaacagaagtaaccctctaaaagccctcgaaagaccgaaagcaaggttggttctggccatgaaaattcagtctagatttcgccacaacgtagtttagtggatcgaagtgggtccagacacgttggcttgtccactttaattctatttgccgccctgccattggtggaaccaccggtggactgattccaaaaatatgcatgagaggtgggtctcgatgaatcccatgggtcccgaggctgcattcgatgattttgtccgatctccccggatctttccatccggctttggaaagcttttcgcatttgaagatggagaggaataaaaggagatcccatttgtcgcagttgctatgtacagtagtgggtcacagacaccttagaatactaggtagaccctatgcaaaggaatatgatagagacaccttggtggagtaccgtgtcgttgcatgatcgaatccaattcattccctggaaagttccatcaggggtttactccgtactaatctcccctatattgttctacggcaacacattcggtctattattaacccacccctattaactaagctcaacccgtgatactcccccgacctcattgatttccaaccctttgtacggggtcatttagaacgatctgctctcgggcaatccttcgactttactccgtaatgaggtgtgattatagattaattatgggccggtagggggcagggcgttgtctcaacgctgtgttgtcgattctagatgtcgaacaatggcattcaatttggatttttctgtatgccatcccgttattattgttccctaactataactgactatgcagatgaccccttgcaggatattattttgatctaaccacaccggttagaacacgttgtagtgcggactacgtgtagactactctgttcttgcccaagtcgacttgaccgatcatacctgctcttaagatggccaaaaataggtattcacacttgtgttcgaggtcagcagcgtaggtacctgaatgtcttacccagcgactttggccttgccgatctttgcttgagtcaaataacattcattattccagatgtatgttgtaggtgagggctatgaatagttcatagtagattccctattcagctcgctcgacaaatattttccatctacttcgtacttcgtaatccggaatggatgggttacattcttcgataggggcctcaatgtccgcccaaccccaacacgagccttttaggtcatttcagtccagattcacattatagtctcgcattgaatcgagtgattggtagtccaataccaatttgttcatcaatatttgttatatatgattaggcatgtattgttcactgtagcaaaatgcctgctatcggcgataaccaactagaagtggggtaattacccacggggacctagggtaacatcgaaggtgtctcaaatcccctttctctacgcccatctgaaaccatggcaattgacgaaaaggttcaagcggtcttgaacaaaacggtcctgcgttatcgcggcccaggaggtgccatcgccgtcgtcaaagatggcgaggtcatcggccagcgtgtctggggattcgccgatctcgaccagcgaattcccatgacagctcaaacgcaaatccccatctgttcaattacaaaacaatttgtgtgtgcgttgttgatcgacctggagcgcaatccaaccccaacactagctgcaaagggcgatgtccggaagcagctctcagatcacctcgccgagatactaagcccggagctcacttctgacggtgaactgacaattgatcgcttatgcgacatgcaatccggcatgcgcgactactgggctatgaccacactatgggggtccaaacccgacgatgagttcctgatagctagagactgcggcccactgcttgcccgaaccaagtcattcatgttccagccgggaacggagtattcctactgcaatgtcaatttccacgtccttgcccgaatcatcgagcgagctacgggcgagtctcttgccaaattgctcgaaaagcggatactccgaccggctggtatgagcacggcattcctttgccccaacaccgcacatcacccaccgccctgtgtcgggtatgagggcgacgagcagcacggcttcacggccgctgtcaataggatggaatggtccggtgatgctggactagtggcttcactcgctgatatgatcgagtacgagaagtatctcgatcgctgttacgctgatccgcagagctggtaccacaccgcgatcgctgctccgaagtttaaagatggcactcctgcaaaataccgttatgggctagatcacgctgacatcgctggcgtgaacaccattggacacggtggagcgttgcgagggtatcgactgcatcggcgacacgctccacgcgagcgtttgtccgtcgttgttatgtctaacagtgacttcggtgcattcggccccaatatggagatcctccacgagctcttgggaatacctaagcctgtggcatcaaccgtccagccggccgcggactgggtcggcgcgtttcttgatcaagatactcagctgtcgattgtcatcaccaagggcgcgcgggatggagaggtggctatcagatacgacgggtcggccgagcctatcaagcttagtgcaccgaatcatgggaagtccgattccatggtcgcgacgattgatggagattttttgagtattcatcgtgtggtagataaccggatactcagtgctcggcgtattgtcccgaaagagtcaatccttaaagggacttcattccagggtgtctatcactgtgccgagattgaatctaccttccattgcattggcgaggatggcatgctatatggtgcgttcgatggatatctgggtcaaggaattgcaactcccatgaaatatctgggagatgatgtctgggtgttgacttgcccacgtggtttggatgcgccagctccgggagactggaccgttgtcttttctcgggatgagcatgatgcaatccaagggtttactattggttgttggttggctaggaaagttgactatgtgaagagagcctgaggcttttattctactatgcagagaaacgattattcatgtccttgatcatctgtcccttcgtatatatgaattacacgcagattccaagatgctagcggctgacagcgacgcactaaaaagtgtcaaaatcgcagtcgtatttagtgcctacatataaaaatatatacagtatcaacggtccttgtcagaagacactttctgcatgcttaatgctcagaaacaaagatacctgccatccccatgccctattcaaaacaattagtatatttcaatactcgaggtcgtgataatcgaaggtaacttacagtgcccacacacatcgaagtcacagcaatccgcttatcctgtcgacgcagctcagacagagcagtgacgacctgacgtgcaccagtggcgcccagagggtgaccaaaagcactttgagacatcagcacggcgtccatcaaatctggtcggagctcacttacatagcaccaccacgcgggttcaccttggattcatccaagcctagcttgttaacacagtaaacaccctgtaataacgagtgttagtcttgcttaatgtatagtcacatgataaacttaccattgaggcaaaggcctcgttaatctcaaaaatatcaatgtcatccttgctcaggttgaacttattcagaatcttagggatggcaagggatgggccaatccccataattctaggctccagaccagaaacagtagcaccacagaacttggcaacaatcggctgaccgagctcctgggcgcgcgagcgtttcatgagaaccagcgcagcagcaccgtcggtaatctgactggcgttaccaccggtggtggcactaggggcccactgcgggaaggcagcgcggaccttgccgagggactcaggggtcgtgccatagcggatgccgtcgtcgcgatcaacgacgatatccttcacctcgccggtcttgggatccttaatttgagtcttgacgggtacaatctcgtcatcaagccatccggccttctgggcgcgctcagccttctgaaaactgttggcagcgaacctgtcgtgctgctcgcgcgtgatattgaactggttagctacattctccgaggtctggcccatgggtagggagttctgggatgcgatcgggtgcttggcgatgcgctcggacatttcaggggcgccgccgtcggcgttcttgctcatgctctcggctccaacggccactccgacatcgatggatccggcggtgatttggttggcgatgttttgcacggctagaagacccgaggagcaaaatcggttggcgatggaggccgctgctgttacgggatagcctgctgccagcaccgcggagcgggcgacatatgccgaaccggggcagaggacgttgccaacgcagacatcttcaacgaggttggggtccagattggatttctcgcggacggtcttcttgatgtattaattactgcaattttcgcctctaatcacggaggaagaagtaccgtgaggagtgaaatgaggaggtcatctacggaggtatctttcaatccacctttgcgggccttggtgagcggcgtcctggctaggtaagtgataacctgccgattattgattaattatggcaatgaagttgcagctgcaatcagtgacataccacatcatctgggttctttgccagaagcttctggcgggctgagccaggagctgccagctggttggcgacggagcttaaacgttgttgcggtgaagacattgtagggtatcaagcagaattatgaatgagctcaagaacaaaacaaagagaaacccgtttttaatattcgctgcagatatatatctcttactaaaaaagaaccgcggcttctccagacatcctccactccgaggactctcatcgtacaatttgagccgactggaagtgccgggactttgggggtcacacggtgtatgatactgtaatttagcgatcctcggcttgtaatggaagactgtgattggtgagtttgtggattcgtggacgtttcatggtcccacatgtacgtgtactttggcttcaatgttgatcaagggggtatgatattgagagagacattggagaagtcaaggatactctcatatcttgtcattagtaccttgatgtgacctcatctccgaagaacaatcttgaagccctagaagaagtgttgagctctcaaaaccggggaaatcttaagctttcccggggagacctcgggaggattatgggggatttcccatagaccccactgtgaattacattgtaaaaagaagatcctttggtatgaacggcagatcaagtctggctagcttccgttattagggctatgcttgggaatctttatatctgttgccatgccagttcctgagagcttcgaattcccactaggcagagaatagggagacacccgttggaaaggaatcactcattttatcgacaaattgacttgacaagtgcttgactagaaggaaatcggccttctctctcacaatggacattttctctgaagtcagcgcgcctgctgtagccatggcatccgccttgtcggtggccgctggtgcttatctgaatgcgaagcttgccattgccactgatctgcgaacaatatacggcgacaatgctactacgaagcggctaaaccagcgcatttctgagctcgacggctcaacaaccatctacaagatactcgagcgggcggtggaggttgaaggacgggctgccaccgatgcgctctggtttgagcagaagacgtggtcatacagtcaactgaaagactgtcagtatatgcctctgtcgggagaaaacatctcatctgattgctaatgcgcctgtctgtagtggtcgatagaatggctgctcttttgaagagccgtgatatcaaccccggtgatacagtaggtgttttcaccaccaattcaccggagatggtcgtgactgtgtatgctttgtcaaaattgggtgctgtagcagcaatgatcaacaccaacctgcgaggtttgttaactatgcaattctaatctggaagaatactgttgacattagtgatagacgatacttttatccattgcgtcaacgtctccggctctaagttgatcatctcatcagcagatttgtctcaagatgtctgcgtcgacctaccacacttcacactcaacctggactcattcgaaggtgccgaaacagatccagtcgagctgatctcctcggaaactctgcagcaattctctccgtcaggacttgcagcagccaagcgcagcccaaaagacccctccctcatgatctacacatcgggaacaaccggaaaacccaaagcctgcgcgatccgcaacatgctaaccttgatcacctccaccccgctctcagcggacgccaacaacccctcaaagtaccacccattccgcgtttactctcctctccccctcttccacggcacggccttcttcaccggcctatgcaccgccctcggtaacggaggcacattatgccttgggcgaagattctccgcctcacggttctggaaggaggtacacgactcaggtgcaacccgcatactctacatcggcgagttatgccggtatcttctcgtaacaccgccatcaccgtacgaccaggaccacaagtgcatcgtggcgagcgggaacgggctgcgcggggagatatgggagaagttccgtaagcgcttcaacgtgcctgagatccgcgagttctaccgctcaaccgagggggtcgccaaattcgacaaccacggtgttggagcttggggggcgggcaaagtcgggttttctgggcccatccgccgcttcttggaagatgatactttcgtcgtcaagtatgataccgatacggagatgccgtaccgtgatcctgtcactggattttgtgtgagggctgctctcggacaggagggtgaggtaattgggcgcgtccgggaccgtgggatgatgattgagtacctgggtaatgagggtgcgacggaagagaagcttctgcgtgatgtgtttcggaagggggatctgttccagcggactggtgacctggttgttcaggagaaatctgggtgggtgaagtttcaggaccgggttggtgacactttccgctggaagggtgagaacgttagcgcaggagagattcgggaccatatttgccggattgaaggtgtccatgatgctgtggtatatggtgtaaagttgagtgggtatgtattcgggccgtcttgttctttcgttttggtgagatcgcattactgatagtctccaccaggtatgatggtcaagctggagccgctggtatcacgctggtatccccagcagatgagacagaattgatgtcgaccttgtacaaggcactcaggaagaagggtgttccttcgtacgctttgcctcgactggtccgacttactgagaagtaagcattcccttgattgcaataatttggccgtggctaatcaaattataatatacagggttgccacaggtgtcactttcaagcaggctaaaggtgatctggcgaagaagggctggaatcctcgccagcattgtggcggtgatattttgtactggttggatggcacaaagtatcaaaagttggaagaacaaagttgggcagagattgagaatggcaaagccaaaatctgaaccttgactcttgataaatccgatgcttgtcgtcttgttaagcaaccatacggatacccatcatagactcggatgaacagaagccatattgtatctgtcgcaagcaaatactaataaggttttagtaggtggatctattcaagtgggtccaatacatccgtccatgggaaatggatggtagcgatagtggagtccggggatatatatccatgatgctgtgtagtagttccatcatagactttctgcgcggacattacaaatgccggcgaaggaatttcagagaaggacattactgaaacgttgcttctgcattggctaaagaactgcatcgtgacggaggcctggtgcaattttgttctctgcgttgagatgacggaagtagccaagcaaattagtagtgcgctggagctaagcagtccatcgaaatctataaatttattacctgcaaagattaatcactgaagcatcttccaatgatggatcctctattcattgtatcttctatagcggccggatactcataaagttcgaaggaatactaattcagattccgtagcaagacgagaatggctttagactcctcctacgacgagtcatcgccgaataaaggctgtacatacacaagtacctattgttcaaggtgtttctcgactcatggtagcttattaggtaccccgtaatatttctgacgtcatctttagagaacgcgggcgaagagctttgattcgcctagaagcgatttctgcgcccatctcgctctttttcctgaactcatttctgaagcaagttaagcgcagcatgaaacttcttcgtattagtcgaccactgactttgattcgtgatttcactctaatattccggggtacaatctctgaaaggagtattgagaataacaatcaccttggccttagtgcggctatcctagtggccttttaaatgagctcatcgatggtcgatccgacataataagatgttttcttgtggtggttgtggcccacccatgtcaagggatactcatgacttaagtcggatgttcgagtgacgggaagttcaacaactaagtaggacagcatccgtagcttggaatggatgtcagtctagaaatgagatgattaataaaaatccctggcatgtttaggtgctgtgcctggcatctggatgccgatcattgataaagaactggagttcgaagtacggagtatctatagtgggtcggatcaactccccacctatgttgtagcatgagacgaatgttcatgtgtagtagaataagatgaaattacggactgatatagagatacaatctctctagcagggattcttgtatccctcagccacaccctgcaggtacatgaggcgtagaaccatggggctacagaaacggtatagatctgccgctgggatcacgtgtggaggcgtcatcaagtgactctctttctcctcaccccaacttctatctcctaatcccaactccgcaccttgtctgagctggaacccactcttttcctgacattcgactgcacatacctgagtgacttacctttgtggccattttcccgaccgaactacaacggtcacagccatgaagttcttatcagccgccagcctcctggttcttaccgctcctcttgcaaatgcagccgcgttctctatctttgatcctacgcaagcttcactcaaggtgaccgataatgggaagtatccagtcaatggtgaaaatcccttgcagtactgtgccaaaccagacaattacaagctcgagatcgagtcggtggatctggcacccaacccgcctctaccgtatgtcatccacgaagagtgctctctaaatgtagtagatttaactagctaacactttggcgataatagagggcagaagttgacaatctcggccaaaggtaccttgctcgagagaatcgagaagggcgctaccgtgaacctggaagtgaagtggggtctcatcaccttgatcaagcagaccgtcgacctatgcgacgagctcaaaaatgtggacatggagtgccccctagagaagggcgagatgatcttgacgaaggaggtggaattgcctaagcagatcccaccggtacgttgtctttaaccgtttgatggttaagcaagcagctaatgtgttcattacagggcaaatactccgttcttgccgatgtttacaacaaggaccaggagcaggtcacctgcctcaaggcagatgacatcgtgttccacctttaatcctgtctatcttagacattgctttgcatccacttaccaggtggcatctctcgatttgctgaactgtcaatgtcattagcttatgtgcttgactggggttcaatcatccgcgatgctcttttccatgcccgtctcatgactacttcaatattcgcatctgttgtttcaagttctataacgctttgcagtacattcggatatcatttggattttctcatttctacgctctttgcatctattatatctttacagtcgtctgtatacacttcagcgagtacgactgtaaacgtgacagctactacctctgtctgtggctacaatttacaatcacatctctactgattacgcaacgtatgttaaatcaattctgtatacggagtaggcgcaaagagaatatatgtaaagggtatgcgaactcgttccagttgcgttgggtatcttccctatctgatatttccatgtttcctttccaattatactcaagcgccgacatcgtcaatgatgggaccgcaggtgttgtaaaccctcgaggcggaacggcgacaccaaatcgcgatttccctgctaaacgacaaagacaaagacccacataaagcaagcctactctccaaacagacgacggacacgcttgagaacactgtccttttccgggtcgtaggggtggtctttgctggggatttcaaggacggctgggaaaggatcggcgaatgcgtcgacgctatggcggatgcgttctgcgatctgaggttgagatacccgttagcgaatatgtaggcaatgagatgagagcgctgagaatagtgcaatctatggaaaagaaactcacatgctggttaatcaagagcacagcaatgtctttcctctcctgggtgaagttctggaaggcctgttcgatctccgaggtctcggtcttggaatcaacgacaaggaagtttctctgggagccaggtggttcggtaacatgctgtaaaaagagccagcacattaggatggcttctcatataaatgtcacagagacgtgacgtagatggggtagtgaacattatcataccccgatgcctgcgagcaaaagaccagtaaccgagctgcatgataggttgagctagttagctgggcgcgagcttttcgaagacgagcaatctggaagaagggtctttactcttcatcaccgatgacagcaaggaattgccgctcctggggaaccgagttagcgatcggaggggtcattccattgaatcgatgccaggtaccttgtatgttgcggccgataccgccatgacgaggaaaaagaaaagaagaaactgagatttccgagatacacaatcttcgaactggcagttcgagatggatcaagtaaatgacagatctggtgcagctgtccgttgatcgccgtggttatcgccgggagcttctcattacataagctgatgcaatttctcagatttcaatgttgtttactccagggcttcatcgtccgcaacacgtgcaatagctcttgactcaacagcgcctcacctttgatgtcattgaattatcttcttaactaagacgaagctgctgaggaacagcttccgtctactacgacccccgtcctctgacatgcctcgacttgtacgccgccgcccgctctccgagcgcatactagcacgcctgaacccgtatgactttctgctttggctttccgaggaatttgaaggtggtgattgggaccagctagagaaaaactgggcttttcccattggtattgcgctcaacgtgatattcctcatcgcgcgagcaaatagccgatccggtggtggtagcagggcttttgacgatgtgttcggcgaggacgatggcacatccctatttgggtggcttgtaagtcattcttcccggctttgtaccttttatgttgcctatcttttcacgagattcatgacaagctaatcggccgtggttgttctaggcctcattcatcatccatctgatggcccttgcctctacgggcaatgctatctacacattccagaagaagagacgctatcgattgtttgagaactctattgataacaacccggcgacaccatcagcacatcgtgtacgggttgattcaagccccgtgatgccgtctccgctgcgctacattgccaaggcgctttcaacagaaccggcacactcgagggcccaccctgatgcacagcgagatgtctgggagcttgcaatatgggacccttcgccactttgtctccggctcttttgcctcttcagcccagggcacgtcttggtatattggctgttccttccgacgcagctctcagatccacgccccagcgtgacgattgtgacgacgatcgttctgaccgctcttctgtccgtgcagatgtccttcatctcttcttcttatacacaacaagctaaggaccagaagattgtacaccaagaggtcttcaaagaatatgacactaaatatgtgcaacctcggacacatccgttgatgagagatgttgggacgcagttctcggatgaaccaccaaagaccgaggaggagtgcaatagggttgagacttatagcccggctcacatcattaaccgtggtttcaagaccagtcccaaccctaattacctcaagcacgtcgacccagaaggtttcaccccagtccgtcagccaactgcatctactcccacctctatattccaaggcccacccacctacaccccgagcatgtctcgagatggctcgcctatggctcgaggcactagccgcacaacaatgcgacaaccgcagttccgatctactgcaacaacatcaacaggtgatggaggaagtctcggtgtttacagccatgctaactctccactgaggaagtccgcgacaacttcatttgatcgccgcttacaaaacaacggagactttgtttacaaggagcgtggtacaactcccttgatgcggagttccagtccgctgaagagaagcagtgtaccgggaggaatgaatccaggtggcccagccaccgtcaatagatcggataagctcaacactcggtactaatacgaacgaatgaccaattccatctccactagcatgaaatgtcgtcgatccagatacgtcagatgcggagtcttctccaagccatgtgcaccaatgacacaatagcagcacccttcgtacatatatcccatcgttaattgaggctatacccaatatagtccatttgacgttttgtttcatggcattcattcaggcccaccacgctggagaatgcaagctacttatctagagattagggtccaaggcatttgctttctttgtgatcgctcgattttgatctctgacttaattgacttcgttcattgtattaaatccattgggcggctatcttgcctcggagtccttaagtttgcagtccactacgtccactaagtctggatcgtgctttcttttcaacgttcagtcttcgcaacttccatgcacagatgatgcaatctatttttaacatgtgggaggaaactgtcattccagatgccggcgggacatttcaaccggcattcaccccaggggctggcattcctaatcaccgacctggcattccgataaaccagggtccggagcacattattcttacgcgttttgagcacgatcacctatgaagatctctcaatagccagtctttttggatcgccccgctcctctgagtctcatatcctctgactgtcgccgaccgacatacatctttgctcagaaaaaccagcacagggaaagaccactctctcttcactcctacacggcatgggctaggacaactagactgtgctgtgcccgtagcatttgccgccccgaccacaatcgctgccagcttcagcccacaatggacgatgctcatgtcaaattgcccgatggacacctggtgaatctctcaccacgatctatacgcccaggtgcgtacaaagcgtatcgagtcgaatacaacccctcgaaagagctctcggcaacacctccacctcgatatccgcaagaaagaagatcaccagaatatgccatctcaggaggcacaccggcaaatatatctcaactgccaaaagctaccaagctgcctgttccgaggagtttcactgagaggcttaacgataactcgagtcaaacgcctagtccgactgcacttcctaaactgaccccatccagccgctccctgggacggctcggtgatcagtctaaaacattggacaaaggtcatgatcaatactggagaaaaatccgggataaattggaggattcgccgttgttagcaagacgtgccaggagcaagggcagtgacaatagctcatctcctaactcgcacatctcccatcaccgcagcagactcccggcaagcactagccaagatcaaacaagcttccgggcaggtagtgcgccatcaggcattccggggccaaacactgtcaataccggtcccgcacaggggtcgaggaacgatgcccccactacccttcccgtggacggccaaaataaatggcggaaggaagacgatcaatgggtcatcttggatgccaccgaaacatcaccccagaaatctgtgagaacagacgcgacgagtggttccagccttcgatctcatccttccgtttcgccagtatccgccgaggacagttctatcaccgactgggaagaccgattcgttgtgaatatgccaactgcaaaagatcccaatcccccaacgatgacggcgcaacaaattgccgagtatcaaagaagcattgaaagagtacaccgggacggtggccaaatggcagacccgaacacagtgcctagtcgtaacgtgtctcctgagatcagacacaatcctagcgaacaaagaatccagagcccaagggaaataactacatatgatggggcatacgagaggcgtcaagtgccgatcttgtcgcaagaggaacattactcctcgccgcagcctcagcaaaatcctcagccggagcaactttcacagcctcaaccccagcaaccccagcccttgactgcatcgcaacgccaagtagccaaccactactacagccctgatgagatcggatataatcgaattagcacaatttgggaggaatcgcccccaaagctcaaggataagcgacacccccaaaacgccgatgggtcttttttagggtgcagggaaatatccggggagaagaatccagacgaaatcctcaggttcgcttctctagacgacgcgagtctgcatccactcccattggccctgggctccaagaagaagcaaaaggcgtcgaaggaagtgaagatagcaacagaccgagaaaccaccaacagagtcgaggagaccgtgatccttcaagaagagcgactgcagtcttctcagaattcgagacctgcccaatgctcgaagccgtcagccatgtaccaggatcggagtttctcccagaacccgtccccaatcccgcggacgaggtcacaggactcgagcaaggagaattatcatcctaccagcaatatatccgagcgatccggaagtctagaagaaaatcggggagacgacgatgtgttcattatcacacccactatcacacgcactatgattcccacgcccgacaagaaagcatcttcgccaaagccgcaagggttgcgtcgtcctggtggcacaaacacagtcaccgccgaggctatcaaagccgttcgggcaaaggcccagatggtctctacaccgtcggggttgcggcccgggggacccaaaatggatatcaagccaacagggcgtaccttgacaacttcccaaacgttgccactcagcagcacatccgccacactgaaagaccaagacgacgagagtcgaaaccaagatcatgcgcaagatcgcaatccggaacgagtagcaggtacaacgtcgaatactatccgtggcttcatccgtaccaccgggcgggcaaaaccttccgggctggccagatcatctacagatagccttgctacaatcctgcgcaacaggactgagtccctccgtacacgcgccgagtctctgcggaatggttcggggtcaccccagcgtgcgaaccaaaagcaatcgccaagtcctcaaccgattcttccgtccagggacaattcggaatcatcacgatcggaacggtcatttcagtccaaagaaaccccaaccgccacgccaaacaggcccgcttcgccaaatgggcctccttcggcaaacaggcccccttcgccgaacaagcccgcttcgccgtccaaaactgctttgacggaaatcaaacccgacgaaccttcagcacgaccgactgcaccaagcaaaccagttaagaaaaaggtgaccttatcagagggatcccctttgtcaacgaaacccgacaagcctcctacatcaaccaaaaagatctccgcactagcaaagccgtctaagttggataaaatccccaagcctacaaagacagccgtgtctgaaaagcctcctcccccgaagacgaagacccctgatacttcaccaaaaaaggaagtgcaggtcaagtccctgcctcgtctccagacctccggtaaagttttggaaatcgcggagctcgatggccttcaggtttcgagtcccaaggagtctcttcaatccaacattacagacttctctaccgatataggcgacatgcactccgaagacaagggtaactctgagggccaaggacccaaccctttggcgctttcacttattttcaatattcttgtcgttgccgtcacccaagtgaataaagctgtgcgaatgggcactgacaacccttacgtcaaatgtgtggccaacaacactttgaacatgaccagtcactgttggcatgtctccaaatgcatatataccgtggtgtctcgctaccgggccacaggaacctggcccaggcctcgcagtgaccaggctatcagtcggttcatggtggagcttcttcaagccattgtgtatctcttgattcttgggtttgcagccatgctaatagcccgtgttattggctacgttgttctcgtgagcagctggattgcatggtttgttcgaccgtttgcatgggccttccagtgtgttggtcgtgccctgataatgtaaaattagacagatatttagctctatgcttgtacaagattgtttctctgggagtctcgagtttggaagggggacgttcgtcgtttttggtgctttcgggtctttgtcctggtctcaagcggttctacctactcacctaattgtgtctttcgactgtattcctagcatatcattaaataggtctcaaacttggatattatatatggaatcattgctcctgtagtagtaagaatttatattgattttgatcttctcgacttgaaccctagaaacagaagccgaagacccatgttgaagagggaaataaaatgacatgtaacttttctcgtgtcccccaaatccggaattcaatcttgtgtatgatattctctctctttttctctctttcagtcaaaaaaaagaaagccaaaacagacccaactccgtcatcctggtgttgaatggtcctgtatggtagcccgggataatcttgcaaaaccaatgccaaagcagagaaaatagaaggaacttaaaacatataaagttgctttcagcaacatttttcatgtgtggaagtgcgttgagcaattctttttttcggttcatgcgaacgaggtatccatctagccgagcagcaactcggcgttttgtgagataaaagaagcattctagaaaaaagcaagaaccgaaagatgagaaaaagaaagcagaaggaaaaaggcagggctgggctaccgtgggcagttctagccgccactgcgagctctatgaaatgagaccaagcgcagaagaataacgaagacgataagaacgaaataggccgtaaaggcataattatgttgaatttttgttcttcttgcattttttggggccatccattcttctggattgtgctagtccaaacagaaaatatgatatagtccagaagagaagcaccgggcttggagaagaatagacccgagaaaataaaagaaaagccgatcgatgaagcgccattgttaaaagagacggggtatcggtacattatgttgaaatgaaaacgctgaggaagaaatcgttgagaggtcttcagtcgtgacgccataagacattgcaggggaagcccgagatgtgttggagtagttgtttgtatgggctgtgttatcgttgagatgagtgatgttgaattaggttaggatgttgagttgatgttatgagaggtttgcaaagatggcatacgaccgaggtaggggtcgagggtgtgaatggatagcaaccagttatgagttgaggaaagctgctctaattggcagcaacgccattttgctcggcattgccgttgtccaatggtaccccaggcagttcgacgttgagatctttgacctcgaggccattgaataattcgaagacagcgttagatcggtggaagtcgttgtcaacgatattgaccagataccagtcgtccatcacctggtgaatcagcttgcgactagggctcgctgcgtcataacatttggaccagtgctcgcccaagaggtatgcttcatccttccaggctaagaaactgactgtctcgacgattgtaggctggatgatctcccgtccggcaaagataccccatgtgagggcattcgggctgtcacgtgtgttggtcctgagctcgcccttcttgttagtggcgtggtaagtcaagtcatcgttcttctcgatgcgagtaatgagctcatcgatcaagttggagggaaccagaagctcaaggtaggctttctggtagacgaaaccgttcttggggccccatccgtgcacaggatggcacgacttgactccattgacagcgggctgagagttgattgtcaaaaatccgcgctggtttaggttgagcaaatcctcctgaatctcgcgcgcttcggtcgtgattggcgaatcactccacggcagtcggtcgagcttgccggtcaagaacttaacaaagatgtccgaaatatccttgatcgattttggctcgccccaaagcttgatgttctgttcatttgtacccttcaggcccacgccgtaagcgtcgagttcaccgaatgcaggtgaacgagaatcggtccagcgaccgttagggtactcatcccatgtctgggtacgagcaacgtatgatgagttacggttgcgccagaatactggtcgcacatcctctgtccttcggccgaggccaagggagggccgccagggcagcgcacgttgaataggggaatcgtccgacgggcaaagatcgagctctttgagaaccaattgagtcgcctgagccaggttcatggtataactaggcattgttaggacatgtcggaacaccagaattgagaaaattagtggagccaacttacaaatgcaggtgtttgataccagctgtgaccaactgtctgcacatattggcgatcagagtctttccgatctctcgaaccgcagaatcatcgttcttgaccggctcaagggcctccatccactcagaaggcaccttgaccttagtccagttggaccgacgaatgaaagatgcgtatgtctggataggcatgataccggggataatggggacagtgatgcccttggctcggcacttcttcacccattcgatgaagttatccgcatcataaaacatctgtgtgacaacaaaagagctgcccgcatcaaccttctccttcaagtggtcgatcaattggtccacatcggtattgtcatcggcaccctcgggatagccacccacaccaatatcaaagtggttgccatatttgtcccgtatgtatttgaccagatccttcgcatagcaaaatccattgtccgtggcctcccatgtttccttgtctcgcggtgggtctcctcgaagagccagaatattggtgcagccagctttgtaggcagcttggagcgcttgatcaaccttctctaatggcatatctgtgcaagtcaagtgcatgcaggtctccaagccatataccgattgtgccacgctgaccatctcgcaagtcagatccgataagcgaccgccagcaccccaggtgatatcgatgaatgaaggacctaacccatgcatgcggtccatccggtcgtaaaggttctgtacaccctgggcggttttaggagggaagaactcgaaggaaattccaatctttccttccgcctcatttttggcaagcttctctcggatatgcattttgttgtgttaatctaatatttgtaagtataccaacatgcctagatagtttccatcaagggtcttcgtgctctgaacaaacataccgagggcaataactattagatcttttgtggaactggaacacccgtgcagatgagacaggcttacttttgctgtccgagaacccgagcacaatccctgtgtactgtgacacctcaatgtctagtaccgaggaatagagggcaacggataaaacacaagaaaagaaatggagaaaagtgaataaatcaagaaattgtgaggctccaaggagagtgaaggagaggaattgaggaacccggtgagcggaacattttggtggacaacatttggcggggaaggccggccatcggaggcacgtggtttatttctttaaaggggaattaggggtccaattggcaggtgaaatcaagaaaaaagggcatagtataagggatcatatgggtttctttcgttttgaactctttatattagaaaataagtatcaattggacttttatagcagaaatccgtttctcagactttataaggcgcgatatgaagccataccgcctgcccctccatagaccggcaaaattttctagttcgggttggtttcgcaatttgaccttgttgactctttgacaacagcttcagttctctagagaattacctacgacacccccaactccaaaatgtcgactgttcctcccccttctgccgatcaggactataagtccaccctcctacccctcctcatctccaacaatgtcctctcgttcggcacctatgttctgaagtctggccgtgaatcaccctacttcttcacctcttccctcctgcacactgcaccattgttgcgcgcctcctctgccgcatacgctagtgtcctgtctgccgagcccttcgtcaccaccaacgccgacggcaccgctcagcccaacttcgatattatcttcggacccgcatacaagggtatccccatttgcgcatctgtcaccaacgagctcgctgtgcgggactccctgtctggaaagaccacttgggacaatgtgagctactccttcaaccgcaaggaggccaaggcgcatggcgagggtggaaacattgtcggtgccccgctgaagggcaagcgggtcgtcattgtggacgatgtcatcactgccggcactgcactccgcgaggctgtcggtatcatcgagaaggaaggcggtatcgtcgccggtgttgttgtcctgctggatcgggaggaacgtgtcagcgataccgagtccaagagcgccattggcgttgcccagcgtgatcttggtgataagatccccattcggtcagtcattggtctccacgacctgattgagaagttgggtgatagcattggcgccggcgaggtccagcgattgaaggactaccgtgagcgctacggtgcccaatagacatcggcttgtggaatccgccaaatcaaggcatgatgtatgagcaaagacagcaggatggataccaggatattttggagttgctctgaatatattattacttgaacattacattacatatattcaaatcaggagacggacaccttccttatgggctatttgacctgtcctcgatcatatttagactagccagcagatggctttcccattggctcatcttgggccaatatgatataatggcaagcaaacttacttacactgttgcccgccaaggttccaggaaaacaggtgataccggtgcttaaccggaggtattcaaaatatactccaatcgggaaacatggagctgagtatgaaagcttcccggtctttagtttcgctaattatgtagcgaatatattcatgggtgtgttttttactctccgaatactttacctatgttatattccaacacacccctgaactgactggctccactcggacgccggaatcctcgtcagcaagacaatgttctatatgaactcgaaaaaatagattgtctggatttaagtaccttggcaagccaataatgagaattgcgcggcaatcgacacgcagcacggcagatgctaccactgctaagttgtttttaacaccgtgcacataagcagcaatacaattgcctcatccagaatgaactgggcagtctatatatgtagcaagatgtattatcagattctgcgctcgggcatatgtatctactgcgtttataacttgatcagtacatggttgggacataccttgacgtagtaattcctaaggtagcaaattcaatagacaacacgtttgttttgagcttcgatctataacaatgcggagatcaaccgctggatacatatatttcgaaatagtcaggttttttttagcaaccttccaaggttccccccagatccttagtgagacatctaattggtgctatgtatacccctactatatgttctacggcagctccggtgatatcccaatggctgtctgcgtttcacaaagagtaacagcgagaaccgagactattttgttattttcaagttattttcgagtcattagagatcacaaataattattgcttaactatctccaattgatacttcgagtggcggaagcctttcaaacctctctctaatgtagcatcacatgccatcttacacttaacccagatcccatcaacaattgaactgtctatatatattgcttcaactaccgtcctcctatgaagacctaggatagctccgctcaaatcctagaacaactaataattccggtgtccaacatggaagtcggcttgcatttagaaatagcagcatatttagttattcttcccttgtttagaaggcttactatagacttgaacaactattgaaacgacttagctttctctaggatagactatagctagcaataagtattagaagttcgtataaattagtacaaagtgcagagtacagggaggctcggaccctgtacacccatatactccatacctttatgcaggccgaataataactttgggaacttagcccaataagaaatgaagacaacttgtttttgtatgcactcaccactgagctaacctgttatttctctgatagatacaattctagagttgctgcgcgttagacggaattcctgatacaaatgttgtcttcacacatcaggactgtagaggcaatgttcgagaccatgtcgatgattcaatatcaacgatttagtactcgggtatgtacaccaactctcaagcaagcaaatttgtttagtttgtctagcgtcgagatttcaattggaccaaaataagtctcgatgtgtattccgcgctgctcgtgatccccgctactctagacactagacactatccataaggtagtctcaccgaatcgtcgtgatacctgtaaagcatggattactctattagcctcgtcgagccacggccattccacaacggccgtctcatgcagagatctatggttattactcgaaacctgagcgatggtgacgcctcgtaagacatagatattcgccgcctgagtcccatggtctctgtaaatagcacacagcgttaattaggatgtcaatcagcatgaggacagaactccgtgtactttgtatctttttgcctcctatcagctgcgccttcggctctaaccgttcattccgggcttcaaggagaattgtcgacgtagcctatgcctattttttggaaccagagagaacaccaggagactttgttggaagaagtagactgtggagtatcatactccctttgaaccacgccgagtgattttacccctactatctctcaaacattctcaggtttctcttatttctattagccattccgcagctctcgatttcctttctttccccaccttttctacttaggagagctcctatagattggagactattggtcatattctacttgatggaaaatgcttaaagtctctcgttgatattagtccttttttctcgtcatcaatacaccaccctttcgcaacccctgcgactttccgaaaaagcaaactgtcaattatatgccctgttagtatcgttccttttcagaatacccgagtggcaagatccgatttggcattggtacctgtcgggtatacgagcctctttctcatatccctttgaaggaattaatggacctgctaacagggaatgatgaaacatagtagctgttcctcggaaagcctagtcgggtcaacggtcttcctcccactctacttcatatccgacacatgctacgatcctaagtttctctgaagcggcttagtacattgtttgtcgaccatgaattggagatataaaatcccagtccttgctcttctcgcagctccaggaatcagttggccctacgacgagactctcactgattataacatcaacgaaaaccaaacagcgaccaaccccttagactactggggagaatggcccgaccacacctactttccttctccagaaaattggcgctttcctgtatatacgcttttccttgaccgatttgtgaacggtgatccaacaaacgacaatataaatgggacactctttgaacatgatatcaattcaaaccaaatgcgacacggaggtgacgtggctggtttgctggacactttggactatttgcaaggaatgggcatcaaggttagcttcatggatggaaccttggtgcatatctaatatcaactgacagttgaacttctagggactttatcttgcaggtttggtattgatgaaccagccatgggggtctgatggttactcagcgcttgacacgactctactcgaccagcattttgggacaattaaaacatggagaacagctataacggagattcacaagcgcggcatgtacgttatttttgacaatacggtctcaacgtaagtcttccgtctaaccatcttctcttattgtgtgacaagaatctaacagcactagcatgggagatctcattggatttgaagggtatatgaatacaactacaccattttcggtcaaagagcacaaggccgcctggaaatcggaccgtcaatatgttgattttcgatatggcaacacctacaatgagacatgtgaatatcctcgcttctggaatgagaccgggtaccccgtggacgagtacgttaattatgagctaggcgggtgctacgacagtgattttgatcaatatggcgatatcgaggcctttggtgtctatcccgactggaaacgagagctcgctaaatttgcatcggtgcaagaccggctgcgcgaatgggtgtctagtgtcaaaaagagaattattcgtcattcgtgtatgatcatcgcttctttcgacatcgacggctttcgctatgacaaagctacgcaagctactgtcgatgcccttggggatatttctgaggcgtatcgaggctgtgctcgccgtgtgggaaaagacaatttcttccttccgggtgagattacaagtggaaatactcttggctctatctttcatgggcgaggacgtcagcctgatatgaagtcccagacgcttgatcaagcctttatgatgacgaatgcctctgatccggattactttatccgtgaccacaacaagcaggcgactgatgctgccgcttttcattactccgtttatcgctccctcacccggttcttaggtatggatggcaacttggctgctggctacgacgttccagttaattggaccgaggcctggtatcaaatggtcctcaccaatgacatgataaacgcgaacactggcaaatttgatccacgccatatgtatggagctacaaaccaggatgtgttccgatggccgaccgttgaatatggcgttgaaaggcaacttcttgctcttttcatcacgacattgcacatgcccggcattcctatgctcctatggggcgaggaacaagcgttttatattttagatgcttcagctgctaactatatatatggccgtcaagcaatgtctcccgcgacagcttggaaaatccacggatgtttccagttgaattcgactcaatatttccagtggcctatcaagtcgggacgtttgggatgctacgatgagacagtcacgtatgaccaccgtgatccagctcaccccgtgcggaacattatcaaacacatgtaccagatgcgacaggactttggtgctctcaatgacgggtggtggattcagctactctcaaaccaaacacgtaacatatatctcccaggttctgacggagttgcaacagaaactggcatgtggtctgtccttcgcagtccatattaccaattgcaggatttgggagaaatgggcaatcaaacggtctggtttgtatatcaaaatgacaaccgaacggtgaactatgagttcgactgttctaaccaaactgccgcattaattgctccattcggtaccaatagcacggtgaaaaacctgttctatccccacgatgagttgacactgcaagagggtccagtcaaacttgggttgaacggctctgacgattacaacggttgccttgacagtatgaggcttcgaccatacgaatttagagcctacatccgaaaagagagatttgtttcccctcgtcctatgataaccaagttcatacctggacatgacactccattgctatctgctgtcgcgccagatgaaagtgagtcagtggatatcagtttgttcttctccacagagatgaattgctctatggtgaccgagtcaatatcgcttgaatcgtccaccgagactggagaacggccttctttggaccttgccagtgttaattgtgggagtgttgaaccggagattacttcttggacaggacaaattccatctacttggtcttggacaggtaccctgactggtgtctacaatggcgtacataaattgacagtgaacaacgcgacaactcccgatgggagggcaactaacgccgtcgatcatttcttgttccgagtcgggcagtctgataaccccatgatctttaccacggcaaattactccagcagcttgcttcacagccgcgatgatggtactcttttcattgcacaacatgcagcaggggcagataaatatcggtactctacaaattggggtagtactttcactgaatggctaccatacgtgggaggaaaccataccattgaagaactgccttggtctggaacaaagaagcagggatgggatgggaaacacgttcgggttgagtactggagtcgccttacaggtagcagcgactacatccaagagggcgacggaccgggctggagtcctgctatccgacgtcggttccctcatctcttttttaatggacctttcaacaggtacggatatgatgccggcttggataacgtcgtgaggcaagataccgatggcctatggaaattccgctttatgactgaatggcctgcccagggtcagctgaacgtctggggtataaaccccgataatcaaccggaccaaagttacatctacggagattccgatggagactcaatcctcgaccgtctaccgccctcttcgctaagtgtgacaagcataaacatcactcggcatccaccgagcccgcacctcgcttggaggattcaactcgatgactcaaatttgcagttcaagcttgttcctacaggctccaaatacgttcaaatggctctttttatccttctttgcattgttcctatcattacagcgtcaacctgcgcttatgtgttcatgaaaacattctatcggatcaagttcaaccaagttggcgtgagtgaaaaaaagacgctcatttcaatggatttcatcaataaattcgaggtaggccacgtggaagatggacagtctagaaacccattcagacgacttacaagcaggtcaaacttccttcaaagtacttctgcttttggtaatcgcactgcccaccgacgaaaagttctgattgcaaccatggaatatgagatcgacgactgggctatcaagataaaaattggtggcttgggtgttatggcacagttaatgggcaaacaactcggacatcaggatcttatctgggttattccctgcgtgggtggagtgaagtatcctgtcgataaacaggcagactcgatgtttgtcatgatcttggggaattcgtatgaaatcaagattcagtaccaccaactgaggaacatcacatatgttttgctggatgcgcctgtttttcgccagcaatccgttatagagccctatccagcccgaatggacgacctcgacagcgctatttactattctgcgtggaaccaatgcattgcccaggcgatgaagcggtttccagttgatctgtatcacatcaatgactatcacggctcggtggcaccgttatatcttttgcccgagactattcctatttgcttatcgctccacaacgccgaatttcaaggtttatggcctatgcgaacacagaaagagagaaccgaagtctgttctgttttcaaccttgatttggatattgtcacacgctatgttcagttcggcgagatcttcaatcttcttcatgccggggcaagctatctgcgccttcatcaacaaggctttggtgccgttggtgtgtcgaagaagtatggaaagcggtcatatgctcgatacccgatcttttggggcttgagaaaagttggaaacctaccgaatcccgacccctctgatacaggcgagtgggatagatccttacctaaggagagagatattggcatcgacaatgacttcgagatccgcagagccgagctaaagcgccaagctcaagaatgggctggtcttaagcaaagacctgacgcggatctgttagtcttcgttggaagatggtcgatgcaaaaaggtatcgacctgatagctgatgtcttgcctggtgtattggagaatcgagaaaacgttcagctgatctgcatcggtccccttattgatttatatggcaaatttgccgcgttgaaactggatcgaatgacgaagctttaccctggtcgagtatgctctaaaccccagttcacggtattaccacacttcatcttctctggtgcagattttgcactaattccgtcacgcgatgaacccttcggtcttgtcgctgtcgaattcggtcggaagggtgcccttgggattggcgccagagtagggggacttgggcagatgcctggctggtggtatacggttgagtccacgactacctcccacctattgaaacagttcaaattggccatcgacagtgcattaaactccaagcccgaggtgagggcgatgatgcgcgcaaggtctgccaagcaacgattcccagttgtccaatgggtcgatgatcttgagatcttacagtccacatcgattcgagtccatcaaaaggaacgaaccaaatcccacagccagtccgctgctgctggtgcatacaatgccatctacgggattatgacgccacaaactgcgtcaacaagatcgggcgcatcaacacctccattacaaccctcaagtcgcccgggtattgtagggtcactacagcgaagctctataatctacagtcgtgatgcaagccctggattcaatgggagacctaaatcgggactaagtcgccagatatctcatggtgttcagccggtatccggcaccattgagcctcgtggtcggcccgacgtcgggaaagtcggtgttatcgagggtgacgacagcgctagtggagcctctccagaggccgaagaaaatagcgacgatgaaatgatggatacctgctatggtgatgatgattattccatgccacctgaaggagtaggcctaggtcgtgcacaaactcctcaacccagtttggcgctcaccaaagaggctctctcggcccaacgcacgagtcaaagctccttgttggctcggtgcagcaacacgccctctagttcaacggcaccgagtactgtcgggacagatgatacccttatccccccttctcgtccatgggcagagccaggaaaccgtctcagtaatgcctcagtcttgtctgtcaattcggttgttggagagaagaaagacttcaaacttcaaaaggttgacccgtactttaccgacagcaatggcgagtactacagagtgtttgaaaaaagactcgaggaactgaatggggcgaactcagacacccaactctgcattgagcaataccttgagaaaagcgaaaagaaatggttcaacaaattccgtgatgcacgccttggcctccatcaaggatcgccagctgtctcaatgcatcgtggcaaagcagagacatccccgacggggtcagttgccaacgacgatgcgacatcccatgaaagtggtgagcgcgaaagaaaaggtgctccgcctgatgaattccttcttggtgatgactacgtgccaccaacagggctgaaaaaatggatgcaaatgcgcatcggagaatggccggtatattctctcttcctcgggctaggtcagatcattgctgccaattcctaccagattacccttctcactggtgaggtcggtcagactgctacaaagttgtacggaattgcgacggtttacctgattacttctattctatggtggtttttcttccgatactacaaatccgtgctcgttttgagtgtgccgtggatcttatacggaacagcctttttgatcatcggaatggcacactttgagcctaactcacacaatcgcggatggattcaaaacgttggaagtagtgtctatgcggctgcatcatcgagcggttccatcttcttcgccctcaatttcggcgatgagagcggtgcaccggtcaaccagtgggtattccgtgcttgtcttatccagggcacgcagcaagcctatgtcattgctctttggtactggggttcaactttgactaaagcaacgaacgcgggaattacggatgtgcaggttagcgtcaccaatacctggaggatgacgtgcgtataacattgaaatcttcatctcaaggatcggagagttgctaaccatttttcatagagcaatatgtacaccagtcgctctcattttatgggcgattggccttatcgtatattttggcttgccaaactactatcgccaaattcccggcaaagtgccatcattctacaaatctgtcttccggcgcaagattgtactttggaactgggtggtcgttattctccagaacttctttttgagtgctccatatggccgaaactggaattgtgagtatccattgggcagacagtttatacgggtcttcttccttcctattcctcgaattacgctaatgattatcacagtcctgtggattacccagcacgccagctcgtggcaaatcctacttctctgtgttgcattcttcggctttgtctggatagcagttctcttcctgctggctaggctatctaagtcccatagttggatcctcccggttctcgcatgtggtctgggtgcacctcgttgggcccagatctggtggggcacatctgggtctgggctgttcctcccctgggctggaagttatacctcgggagctcttatatcccgcagtctttggctctggcttggggtcttggatgcattacaaggcctaggatttggtatgattctgctgcaaacactgacacgtatgcacatctgcttcacccttctggtatcacaggtcctgggctctctcgcaactatttgtgcaagggccttcgcaccaaacaacattggcccagggcctatctctccagatatcacggctggtgcgggcgctttgggtaacgcttggttttgggttgctcttttattgcagctctcgatctggtatgtgcgcccttgtaaggatatgagaaccccgtctaacgtctagattgaagtggtggctttctccttttcttccgacgggagcaattatcgaagccctgatcaacagcgcatttgttttgctggaagtgggcggaatggattgatgattcaagctctgcaattgtggtttcggatttccttgcgtacattgatgatatagttgcgtgttgttcgagtggctgatttgctgtcaaacagaaatggcccgaagtatttagtgtctaatataatgatacaatatctgacaagcgacagaccgtggccacacctgaataaaagttgagacccacctagtgggacccactcatcctaaccgtaaaattctataaaataccttaatatatcctatttgtggtatactaactgaattgggaggtccttagtgatggtaaatgatgacgatggtgtgccaaaatggaattcgagaccaagaatgtctcggtgccatatttgcgacgtctgagatatcagttgacgactgggtgttcgccttggagacgatgcttggcaggacgaagcacgaagcaggaggggagatccgatctggcaacggctactagccagttgtacggagtagtatcagactcctttggtcacaatcacaatctcgaggtgaaatagaaagtgggaagagaataggtgataagggccagtccaaacggaatattcctcaactagggcatcctatccttcatttccttttccattttatgaatccgcctccacagtaaccaaagcttaatgagattagatcacaaagctcatacttcaatgcgctggtatatagacgcgaacgccactgaaagaataaaaaaaataaaagattttgacattcaggtcatcgtccattgtgacgatgagggtaaggcagagataaagggattctggcagctgcagcgcagagatatgggcaaaaatacgtgagcagaagataacaagaagtttgaaaatggggaagattgaattatcatagacatcagtatgattcaatagttgccagcagtttacagggtaaccacgacttgcggccgtttcccaattgggattagtctcacaagaaacacatttttagctcgctctacgtattatttacgctacaatgtagaacgaggaataattttttgttatataaagtacccacgatcataattcattctcgttgaaattcgtaggctacccaaattataaaatagcccatgattagcatagggcaaagcaaaacacaaacagtagccgcaacaagtaggggaatatgattctaaaatccaaacatgacacaaaaatgaattgccgcagtgccaagagccaaacccaggcacttgacaaacacaaagaacaacttttaccactcaaggggctcgttcttcacatcaccgcggttggtcttggggacgggagcggcctcaaccatagtcgcgccacggcggccacggcggaggtaggcactgccatccaaccagggggtatcgagggtgcgcttggcctcgaaagtgcggatcttggactccatctggagagtaagaccgatgtcatccaggccgttgacgagacagtgcttgcggaaagcttcgacttcaaaggcagtgatcttgttaccctgagcatccttgatctcctggttgacaaggtcaacctcgacctcacggccggcgcgggcctcatcggcgatcttctgcagagcaacctcatcagagacgatgacaggcagcataccgttcttgaaggtgttgttgaagaagatgtcggcaaacgagggggcgatgatgcacttgataccgaagtcgagcagagcccagggggcgtgctcgcgggagctaccgcatccgaagttggggccggtaacaaccaggatcttggagttacggtaaatgccctggttcaggatgaaatcggggttctccttgtcgtcggtgtaacggagctcatagaacagcgcagtaccgagacctgtgcgcttgatggtcttgaggaattgcttggggatgatggcatcggtgtcgacgttggcgcgctccagaggcgccgcgatacccttcagggtggtgaacgggggaagaccggtgctctggccaccgccgctagcaggcgctaaagtgtttgtgtggggctcgttgtcttcagggaaatccatgacacgctcgagttcgtcctcgctgtcgggcgattcgatctcgggctggacgtcgaccttaggcgaggccttgccgaggacggggctggctacgatgtgctcacggacatcagcgagcttgccgacaatggcagcagtggcggccatggcgggggacatgaggtgagtacggccctgggcaccctggcgaccctcgaagttgcggttggaggtactagcacagcgctccttgggggacaggatatctgggttcatacccaggcacatggagcagcccgcctcacgccattcgaaaccggcatcagtgaagatcttgtcgaggccctcggactcagcctgctccttgacgagaccagacccagggacaatcatagcacgcttgatgttggaggcaaccttacggcccttgaccaccttggccgcggcacgcagatcctcgatacgagcgtttgtgcaagatccaatgaagaccttgtcaaccacaacctccttcataggagtaccagagacaagacccatgtactcgagagcacgcttgcaagagtccttgcggttctcgtcctcgaagtcgtcggggctggggacaacaccagtgatcgggaccacgtcctgaggagaggtaccccatgagatggtgggaatgatatccttgccgtcaaggaagacctcggtatcgtacttggccccagcgtccgacttcaggctggaccagtagctgacggcctttttccactctgcgctaccgtacttgggggccagaggacggcccttgaggtattcgaaggtgatctcgtcgggcgcaatcataccggaacgggcaccaccctcaatggacatgttgcacatggacatacgggcctccatgctcagtccacggatgacagatccgcagaactcaataacagcaccgttaccaccagcagtgccgatgacaccgatgatgtggagaacgacatccttactggtgacgccggcggggagctcgccatcaacctggatgcgcatatttttgctgcggcgggtaatgagtgtctgggtagcgaggacgtgctcgacttcactggttccaataccgaacgcgagggcaccgaaagcaccgtgtgtggaggtgtggctgtcaccgcaaacgacagttgtgccaggcagagtgaaaccttgctcggggccgataatgtggacaataccctggcgcttgtcgcccataccgaagtaagtgaggccaaagtccttcacgttctgttccagggttgtgcattggagacgcgaatcattctccttgatgaagtcaccggcatttttgaaatttttccgtgaagtggtgggaatgttctatccgaagaaaacctccaattagtcgcgagttattagtagatatgggattgaacatacgtgatcaactgtagccagagtgcagtctggtcggcgaaccgagcggctagcgtttgtgagtccctcgaaggcctgaggagatgtaacctcatgaaccaggtgtcggtcaatgtagatcaggcaagtgccatcgtcttgctcgttgacgatgtggtcttgaaagaccttgtcatacaaggtcttgggttgtgagacggcagaaggcatgatggtggagagtagaaatctgctgggagagaggatataagagtacaagatttaatgaagagagagagcagataatagggagctctgatgaagagcaatatagtagtaaatagtaagtaccgagatctgggcaactggaatgggaatgcctgttatatttttctgcgctgaacatccgcgatgtcgctggagagcttcttgaggggcaaggccgatctcggccggtcagcggcgaatggtaccaattttattggccgatgtggtagcacggcggatggccgatatcggttggcgttggacgatccaaaaaggggaacgcggctaatcacgctttgtggcggatacccgtagaccgctccggcccaagtaatgcaggcgcgctgattggctgtactttcccaaggttccgcctccgatcggcccgccggtttttggctcgacgcttatacgcttagcactgtgaatacgcatccggggagcctcaatatactccttcatcggctgaatgtgggttgtatacggagtactccgtacgttgatctggcttctcattcgggagtcatttcacaatatcagatgcattcatattctcggaaacataactgtcaagttttttgaacttgttcatgatctaacgatctacctaaagtcaggtatcaaaaaacgccaatcctgtatatctctaaagcaaaatttcatcaaggaagaaagcacgcaagcccgctgcccataggctaccgagacgaagcgcccaggtcgaccactatcctctttccagacactgagccactccgcaaggtctcgagtgccgcattaataccctccaacccaccctctgcatgaacaatctctggcaatgtaagatgtgtcgattgcagaagatcttccaaccagcagaccatagcttcacccactgtgggggctgaatggaagagcttaataggcacagtgtgatattgtacaccgggattcttctctttgggcagaccagttaatccaaggaggtgggcgtggccatcaggattcagcgccttttcaagctgtgttgctgtctctcttccgactatatcaatggcatatcgcagcttgcccccggtgacaccgcggataatttccactgcgcgatcagggtcatgtcgatcgactatcagatctgcaccggactgcacaagcttggcaccatgtcgtgctgcatcggccacgcaaatcacgcgtaacccggcgagtttggcgagctgaagagtaatcaaaccagtcgttgttgaggctgcagtatgaatgtcagtggtcagttcataggtagtaacatcggattgattcttacctccccagatagcaacccagtctccgcgttgtggcttttctgagtccaataatgatgcaaagcattcttcatgtatgtcggcgggtatatcattcttattgagttttttgatgatattgggcaaattaggaccgggcacttgtgtgatgagtgaaaagtctaatccaaatgagacacccaaagccagcacagcagcgacgaatgcgactccgacagaagctgaagcgtggatagatgttgaagcaggaattcgggcagcattgaagtcggtggcaatggcgtattcttggaatgctgctttcctaatatcccggtaatctgttgatgggaccatcacaacatcgcctacacgaagacgggatgagcctttggggacttgcagcacaaggccagccaaatcccgcccgttgatccatggcaggctagggataccaaagttgaatgcactgatcaatttatctgttagtcatgcactataactgcccagaatcgtacaacttacggtcccttccagtcgatggggttgaggccgatggcaagaacctgcaaatcaacagtcagcatctcgtgttatacaagatccggtggcctgtcgtaccttgacaaggatctctccctcatgcaaaaccgaaggaatggcatgatcatctaccagggcgtactgttcacgggcccccttgagaagcaagactcgttgtcttgccgcctcagaccgcggcgacgggggttcactctccgaccttgacacatcagagtaatctgagacagactccgaaaacagagtagtcggggtcttctgcaactcttcgagttggaggcaagtagaggtagtcgacatggtgcacgggggtaataatggcatggcttggaaggtagatcgcagagaaaacgccaacccaactattaggcttctatctatattgcgcttcgtcccagtctatataatctctcgggcgagaagataaagacaaagcacgcctcaatttagggcgcggggcagtggtccgaatccctcccatgagcacgtacatagggtcggagtacctccactaatcgcttggctctgagatttcttgcaagatctatgggataatttcgtctcacattcgcgcaatgaggacatttccgtacttccgggggccttattcgtagtcgttatccattgctcatggcggggcatctatggcgtgataaactagatggccgagggtcgatccaacgctcttatatctgccgaaagatgggggactttaaggattggaatgaccaaaggatctaatagaaatttgattggctatatatatgcaatagatcaatagagattgaatattctcgactctgttgaagtacaaaatcgaaaaattggatctcgaatctcgaatttctgagtttatccaaactgatgtgatcgcggcttgcgatgacgaaaactcgcaacctctagccctaagatgtcaacaccaaggacctgaatcacgaatatccggggcttctgagatctgttgagatattattttttattttatctatggagtacggaagaaattatttaccgacttaatccaacatacgtagttggtgattatggatatggaatatatatgtgatccctgagattcgttgtagctgtgcaacataagttgtaacagcatatccttttatagtgattggtacagtaaagctccgaataccacttgcgtatactagtcaggagtaattcgcgtctattttacgtacttatgttgtttagaatacaagctgggattcatagggtatctcctccatgttcccatgcatccatactcagaattccttggattattatcaattccctagatattaccttcattggcaagcattggcaagcattggcaagcctcttcttcactagacctaagaactctactctataaactttccaatttgggatattcgcctgcaggatttctgcccatctcctaagagtcccgtgcgagcacgtaattccaccgtagaacgacaacattgactgggtgtccaagctcgagccgttggaagctagacaggggtccagcaagacgaaacaaccagtcctttccgctattgccattcgcggagcagatcgttcggggcagtacagccgacaacgtggtatagacctcgtgggcgcgaaggttataaaccaccacaacgcctgtgaaaaaaaaaattattcactactcaattatatcttttatttcatcatgacgaactcagaaaaggaagctgtcccgagtgagaaggtggacagtgcaggttctatcacctcgcccgttggtgggccacataaaggtgagtttggaacaatgttcctgtccaacgtcgatgaagctgactttgaccctgatagtcaagtggtaccgatcgacattctacaatgccttcatcctcggtctttgcaacttcctcgcccctggaatctggggcgccatgaactctttgggtggaggaggtgaagagaaaccttacctcgtcaacgcagcgaacgccttgaccttcggtcttatggtcgtctcttgcttcttcagcagtgtcctcgtacgattcatcggcatcaaatgggcactcatcgtcggaacaatgggatacgcaccttacgcagcggggctgtacacaaacaaccgatttggcgtcgaatggctggttctcctgggcgcggcactttgcggcatctcggccggtattttctggatggcagaggcagcaattgcactttcgtaccccgagccatacaaccaaggccgcttcctgggattctggctcagcttccgtgttggaggacaaatcctcggcggtgccatcaacctgggcatcaatgccaatcggtcgaactcgggctctgtctcatacactgtgtacctgattttcattgcgctgcaggcactctgcccctttgctggtctgctgttgagcaatccctctcaggtccagcgaaaagacggagtccctgttaacctgcaggtgacaaaaagtatcacacatgagctgaagagcatgtggaagctttggatcaatcgcaagttcctgtacatcattccgttcatctgccaggctgtgtacacagaggctgtgatgttctcatacgagggattgtggttctcggtgcgagccagagccctcgggtcattcctttccggtgtggtcgctgtaaccatcggcaacattctcggagccttccttgacagcaagcgggtatccctgaaaaacagaactcgatacgcgttttacttcgttgtcgcatggcaaggcatgtgctggatctgggctacagtggtgacaaccgagtttaacgaaacacacccgacatatgactggtctactccaggcttcgggagagccttcgccctcttcctgttctgggttgctggcttccagctcaactatatgtacctgtaagttgaatctccattggtgactattcagtccatgttactaactgatcaggtttttcttggtgggcaaccttgccgatgatcaagaagaagtcgtccggattgcgggcttgttgcgtggaactgaatccgcagctcagtgtgtcagcgtacgtacacctcttatctcgcttccgtgcaacatgaatactaacgagctatctctagtacggtctaagcagcgtgaacatcatggccgcggtggggagtatttatctcaactttggcttgtgggctatcgcgataatccctacctggatcattatcaaagacatcggaacagcctttgaggataaaaagatcgctagagagactcctggtttgcgcgaggccgtcgatcaggagtaatttgtttggagcgtatactggcgcaaatattttaaaagttggtacagcacaagaacatttaatttagaatttggtgtatcaccttccgcgttcaaaatatatacattgaaatgatgatgcttttatgatgagcctgttcccggggttctcgcaacccaggtcaattttaaatctatgcgataaaaccgaactccctattatcatggtggaacacgagcaatgcaaggcgatgtctgacgaacagaccgagcatcccacaggcagtttgtactgcaaccatgtgccacgccagttggtcttctcgcattggacccacccacaccagccaaagattcaagatggtgagattactggattcagtgattcgaccattctcgtcttgggtgattcgcaccagtttcaaggtgtgtaataagcgtagtacggtatcgatgaagtgcgaaggaggactcgtccactccgtgactgaagcgtccagcaacccagtggaagcgtggaactttggtaaccgatgacgaggacaaggaatgagatggaatagttggggagtggagtaaaggaaattgaagatctgtggaatgaacagtagtaacagggttttgctgaaatgccctaggataccaaccacggcaaacaccattcctgcgaaatagcagtatgtatcgcccacaaacaccttcgacggataccaattatggcatagaagggctgccgacacaccgatgaatggaagcaggaagtacatcgacaataagtgcgagtcggtggcagggtgcgggtatggtgtcataggtgcaaggtacatcgcatcattgaatagcaattggatcgcaatcaccagtgactgagctacctcgataccattaatgcctgccaacatgttgatcgcgtttggacagaagattgccaccgctgccatatacatgtagtacagccatccaagatcgacaacatcacccaggtaaggttgcagcggcaccggcacgacgacttgagtgacgccaaagtcgacaaagtacacaatgagcatggggattgcggaaaaagcagggatgaggactttgtgtctccagcgaatgtcgaatagatcatcaccgattccgagaatcacaacggattgcaaagacagaagaccagaaaggtaggaggcgagctattcaattgcacattaaattgggtatgcctcagtcaattgaaatcagaactcaccttgccatgtggaaatcgatgaagaaatcggccattctcaatatgttgcgatggaaccacaacgtcacggtttccgcctccggatgtggctgcaacgatatccttgtagaaggcaaaaggaatgaacataatgagcgccatcagatacacaactgcgcagactgcacccatagtttcaggtctagaacaagatattagtacatgctatgaatatgatctcaagttcaagagccatatacatacatctcgggccggctaggctttgccatatccttgcctttaagtcctgctttcaaaaatacagggccgagccacctgatcagactaaaagccacagcaaatactatgccacatagtgcaattgaagcgactaaaggcgccccatcgccttggaacgtggcgttgagtatggctaaaccggcccccacgagtgccagtagacgccaagtctccttacgggagagggtgcttgggttattcatggcggacacacgaccaaaatggcacggacaaggcccctctgctgcaatgaggaattcacaagaaattcacaagaaattaacctatacaacaagagggaaagtccacgtcgaccgcaatctgtcttcattcttcgataagcttatcgtgttctgccagagttatcccaccgccaattttagcggtgagagggcatccccgtgatgcttgcgaccaataaaggtaaggcgacgtcaaccaactgtttcatacctcatacgtgcagatgcatgaaatccaaatcctcattggcccagatatttaattcgtcagtcttctagcccaagtccgttccgatgggggcaatggagcgccccgaggtaacggccggatttgccgacttcgacgctggccatcgggatctggtcaccgtcaccagatttaacttctatggcaaccgtattgttaccgcttcttctgatcaccggatgaaagtttgggatctacaggatggcaaatggcaaccgatagacacctggcgcgcgcacgatgccgagattcgcgatgtatgtccccaaagaagctagggccaaggctaccattgcggctcgtactaaactactattttaggccacatggaatagtcctttcacaggccaacacattggcagtgttggagaggatatgaagttaaaaatctggcaagaagatgtcacccagccattaaacacaggacggcgattcaagtcaatctatcgcatgactgcaccacaaaggcatccatttgtatcactcgactttcgcaacattgacctggagtcatggcttgccgtgatcacacgggacggctatcttatggttatggaacctgtcagccccgatagccttgcagattggcagcctattgaccagttccgtgtgtgcactgccccggaacgcggcgaggaaacaagtttcaaagtccagttccatcacgatcctaccgacattacccacactgtcttaccggagtccgatcggaagagcctgtcgctaattgtggctgccatggacaccgtcaagctctatcgcactgatgcaaatcgacgattctaccatgcagttgaactcaatgggcacagtggtcttgtgagagacatctcctgggccaatggttctgtgcgtggttatgatcttattgcgagcggcggcaaggatggtttcatccgcatctttgaagtgtacacgacaccagctggccaaacactacagatattcaacggccggaaggcagaacttcgcaagcagccccagtcgcagtcacagtcgccccgagcgacatcgcaatccgggatcggctctgctctagcaaaccgtgtgcctgcgtcggtgactgatcgccaagccagcggggagccacaatttcggcactcgttcaaacaggtagcttgcattgacaccaaacacctcgatgtgtggcaggtccaattctcgttttctggtgagtattctttatttattaattcaaatcttttcgctaatatactgccaggtgactcgttgatctcctcaggagacgatggaaaagttcggttctggaaaagatctttgtctggagaatggctcgagttcgccgaaacagacatggcgtctcagtgatgttcttccaagcactgcaagaccttattcgggattcttgaaaatgcccaacacttgtctcttcctacgctctcagccatcaggcccatttattttgttcgcaatcaatgataccctctacctttgatttttgcttactcctgtgatctcacttggtagtattagtggaactaatgtgctggatttaaggtcgatgtttttgctttatctgtatctccatcatacgaggaaagaacgatgttaggagatgccgtggttggtcccttgacaattttcctctcgagccaaaccactctccactctctatcctcgtgcctataactgttttattatctatattcattgttaattcactatggctgtcggtccgaccatcggcactggtttgttcgtcggcgctggccaggccctcgcggttggcggacctgcctcgctactcatgtcgtacataatcctatctcttttgacctttgccatgaccacgagcgtggccgaagtatccagtcacatgccatcgcaacatggcacactcgttaccaatggctacctgtacatgtcaagcagtctggcatttgcttcagcatacctccgctggtataccctcgctttgtttgttccatacgaaattacatcggcgatggtcaatcttggcctatggaaaccgggttccactatcgcaatcagattgactatcatcacgaccatcgttgttggcttcaactttctgccagaaagactcttcaaaagttccgagcgagtattcactatgatgaagatcggcacaatggcgaccctgttcgtgctctctgtggccctgggtcttgggggtgtggatgcacagcccccatggggattcaaatactggaaaactccgggtgccatgaacgagtatctagttcgaggcatatggggacgactcctgggtttcttgcaatgcctccttgatggctctatcgctttcacgtttgcccctgagctgattgtgcaccgagcggaaatgccagcatcactcgtgccagcatcacttggcgaaacaacgatgctaagcgccggtatcgccggtagagtcacgtccgacgttgctcaaacggcattgccgtatatcatgagctccctggccatgggcgttatggctcctttcaatgagacgcgcctaacgaacaacggaacaggttctgggctttccccttacctgatcggactcagtgatgcaaaaattcaaattgtacctacgatcgcgatgattgcaatcctgctctccgcggtggcttctgggcgatcctttttgtatctctcttctcgcacactttgtgcaatgtcagagctcggtcatgcgccctcgatatttgccactcgcaaccgttggaatgttccgtatttggccgttgtagcatccgccctgttctgctgtcttgcatttgcttccgtgaaagtgccgagtaccatcatgaacacctatctccttcgcctcgttacgagcgccggtttcatttcctcgcttgtgtcatgcaacatccatcatcacttcaatcgccggctccgattgaacaacatcaccaaacggtataatttctcttcacagccagtcggtacatacttcgggatgatcatcagtaccctactgctgctgggcggcggattgtgggcaggaccgaagggaaatattattgggtcccgagcagccagactgatcacctcatatgtcaatatcggggtattcggcctgctgttcttggtccatcgattgcaagactttttgcccgctgtcgaagttggaagacaagaggatctgggtggacacaaccatggcgaccatgaaggaccaagagattctcggacacagaagacatatccgcatcgggggaaactcgatgtaatcccagagggttccgggacatttgagttgcgactcagccagaccacgttctcggagccttgagtgtacgacatgatcgccgacggagatcaagcgacatgcgcgatggtatagaagtggaaaccgctgcgacctagcattgttattgttatgtgttattattgttattattattagcgattagttattccgagttcagttcattcttttttattataatagcattgctaaatagaagaacaggcctgatttaactagtgaatgccaaatatagaatacagtaacttttatatacaacaaacatactaaaactgaccggacaattttttatttttgttgtaccttttgtagtggcaaatggcgccaaatcacaaatcatatcggaatcctaacaaagcccccccttttaccacttgggacaactccgaacctctccaacttcctttcccttttctctctgccggcttttcacgtttgatatacaatccacgcctgaaaccttgtcgtacaagaacagatgacccctttggcccccccctctttgataccataaccttccccatctcctccgatccctcccaagcattttccgtgttttcccatgttacattttactttgcttcttcatacttcctatactccctcatactacctggatacttcatcggcccgccggaactctccctcatttgcacttctaatacttccccacaggtaacccaagtcgcctcctattctcccttactttctcacggatttctttcccgagccgagtttatgggatttcctttgtcctccctcaagcagattcccgtctctatgaggtttgaaggacggccggatcacaaccctcccagcacattcaagacctatatcattttttatgggatcttggtcgctgtgagatatctcgctttccaaggctactacatggcccgacatggcttttattatacccaggctgcctcttgattcatttgaggatatatgtatccttcttttttcatatcagtttcctactcacccatctagatgctaaccttcacgattgccccgttgattcccactgggatgcctagggcacccaatgacattcccgtgacttgccccactgcggtgaatgccgctagtccctattctgactagcgtgttccatggcttcctgagaacagtcggttttgcagattaccaaattacgataccggtaaccttggaatttttccaaattgccaggaaacctgcccggggggtgtctttcttttcacaatgaaatccaagagaaagagacagagcaagagagagaggcccctccgatggttgttttcgggtcgagtccttcccctcctcccccacccccctcgaagtcctctggtttctcccaagtccagacatcgccccctttcacccttacgcacatggtctctctaccagcccggaccgcccattctctgccttaggcccccgtagcctcctccttcctctgtctccagttcctcaaactcgctctctttttcctctcctttcccctaccctctttttttcgcgcttttcttcccttcttccttgttttctctcatttaatctttgcgccaacctcttctaatctctttccgatcatcgattctacgacttcctcacccccctttcgcttccttcttgtgaccgcaccgtcttcaactttccaacgcgttcactgtcctagcgagacgagattggaaagcgacacgaccacgagaaaaactgatatgcgactggaatagtgacagcctggctacgcctctgtcgagaaaacatcattttgtcttcgcctgagagggggttatctgtcggcgatgacagatacctcctccctcgccatcacgcacgccaccacggattcctatccggtccacgcccatcgcgggtcccctgctgctgtcgacggcgccgcctctgactccggcgcacccgatgaagaaccttacaccatcaaatgcatttgctcgttcgatgaagatgatggcaacacggtgttctgcgaagggtgtgagacatggcagcacattctctgctactacccggataagaaggtaccagatgtgcacaactgtgtcgactgcgagccacggccccttgacaaccgtcgtgcccacgaacgacaacggcagcggcggattcgagagaaaagcgaggacggcgaccggaaagcaagacgatctgggcccagaacacaaaagagaaagtccaatgatgctgatgtgaatgcctttggtcataaacgacatgactcgggttcccgtgagcagccaccgtcgaagagaacaaaggtgtctcgcgggccatcaacttcactgagcggtatttcggttcccccgggtctgtcggccgaagcgcgaaaccgacgatcgtctacctcggttgcggtgagcccaacaggcatccctggccctcctattccccattattcggaagaatttctctctctttacgaccgcgatgatcaatttgttgaatcgaagagtattctcaattacggcgtggattttgtgaatgaaattgtggcgtggctgaaggacccacagatcttggcccgagttaccgatggactcagtgttgaagacttcgccaaacggtccgaagaggccatggatcggtctcgttggccctcattggtaacggaaactgtcacggactcgacaattgagatgggtggtaagcaccccgtccacaagatcttgaaaacaaaggatccagttcagaaggacgatgtcgtcggtgaaatcttcggcaaactaggccacgtcaaagattataaaaagctccacagcaaccgatggaatgaattggggcacgccctgcctttcgtgttcttcaaccgacagctggacttgtacatcgacagtcgtcaggagggaaacgagctccgccacgttcggcggtcgtgcgaggccaatgttaacttgaaaatctacatcaccaatggccgccagtaccatttttgcttcgttgcgaaaagagacatacctgccaatacggaaattactaccatgtggtatttcgacgattctttctttccttccgatgcgacagtgaaggaggagttcaaagacagggtggtagacccgacggacgccgctatttgcattagcaccacattggcgaatttcggtggttgtgcttgtggaaacccccagacttgcgtattgaacaagcttgatcgtcgcgccaagccccctcccaacaaacgctccaaatcgaagctcaagggcaagaccaggaagccaaagtccctcggcctccccgctgatatcggtcgcgccggcagcgaaaccaccaagcatgttgatgagcacgaccctccggccgacgcccgatcaacttctggctccgcgcgtggtagacatactggcagcagtcgcgatctcagtcccacggcgtcacagctaactctgccagagctctccagtcgcgaaagacgtaagatagcggatgccgaaaaacaatttcaacagctagagcaggttaggaacgtcaatgccaaaaggaaaaggcgctctaatcgccctccgacacggtttacccccgcgacacagtcgagctcaactcaaactggcgaggacttcaaaccttaccacgagtttggccctgatcgaaagacccgtcaagttacctatgttgacgctcaaactgaactctacgccgatgatgttgaacgctcgttcttgcgcgcagaacgtctgaggcgaggatacaaactcgacatgatccatcctacacttatgcataagattcggtggtgcgcggggcatcacatcgcagaggacttggcccagcgaaatgcatgggaggccggggacttgagtgtcgtgccatctggggtcatcccctggtggtacggttggttcccgctcccaatcgacgacaggtctcatatcgaattgctcaaggaagattccgaccgaatgggaatacctgctgatcacggtccccttgcgatgccccctcggtggtctttccaccagtccaagtatctccagcctgaatacaactaccatggcattgcgatcagaggaatacattatgaccctccagcgcgaccagtccaaggtgatgttgatactcggggcgctctctcatacaaacgaggatccttcgcatctggctctagcagtgatttgctcaagctctccatttcaccttactggccatccactgcagcgcataccttaaggattccgggggctggcaatcgtggctatctgcgtgtttccatgccaccaccatcgaacattccgtcagtccttagtcctggttccatgtccacggggagtctcgcatcacttagttctcgtgacacggcctccccaatctctcttgtgccatcctctggttctacactcgcaggtacgcctgccaagaagaaactcagtcttggtgattatctgatccgacgtggcacaatgacaaccaccccgacttcggagccagctcctgccccaccttctggtccgcctcccgacgattcacgtctacgtactcaacactttctggctatcacttcggtttttggtgataatcatcaacctcctaagaccgaccccggagaccagaaccagtctccggatatcattatgacggacgcaccggaggcaacacccaccaaaaatccatctatctcttcgtaatacgaccatccacgtggtagtaatggtgggcctgtgataaagggaaaattccgccgtggatttaacgttatcttacgacccaaaatttcttttctcgtgtgatttcatttcgataccttacagcgaggcgggcacggcgttcggacttcaacttttttttggctatctgtgccggcttcttttttcttttttttctctccgacttttcggactctggatggcgtatggcgtggtttgggattggttgggaaataccatttgggtcagcgtctttgggaagtgtgtctgcctgagttgcagcacttgatctttcacgatttgtccagtcttggatatgtatggcctcttttcgagatgctagatagcttgtatgaacaatgtaactttttctgtctaacgtttccgacttcgcatgttttattctagtattcctctctgtgtggcttttcctattcaaattaagtggagcttcttgtttgactacgacggtgatgggtaagatgactcaatcatcatgaggggaacggggaaattcttcacccggcccctcgtttcttctcttattatctgtgatttctgcaactcatatccaatgcttatgccattgatcctaaagcagaatgaacaattccaacgatgaaggcctcgtgctggacgagatgcatcccagaccagcagaagtccccgagatcgagcagcccgctctccctccagcagacggagggaaagccgcatggctgatgctagcttcatgctgcttcatccagctaccagtctggggtctgtcgtgaccgaagcaagactctatctgcatgtaaacactaacgcaacatctagggttctccaccgttttcggcgtcttccaagaataccacttaacacacgacgtcctaaaggggagcaagagtgacctagcgactgttggaactacttcgaccgtacgcaactgatacatatgtcaacgaggccggctgtgctctagtctaatgctttatgttatccctagggactgctctatcttctctcgcctatcacttttacgcttttaacgagatacccgcgtctgcagtattattgtgcacccacgggcttggtcatcaccgtgctgggatctctgttgtcctcgttcgcggtgcgcgtgtggcagttgatcgctacacagggtgtcctgtgtgccatcggcaatgggctcttgttcagtccgtcttccttgtaccttgatcaatggttcttgcgcaggaaaggccttgcgcttgggactatgtgggcggcgaagagtattacaggtgttgttttgcctttcgttgctagtgcttgtctaaataggtttggctcgagtactacgctaaaggcttggactgtcgtcacggtatgagcttcctctttcctcggtttgatgttaagcatagggtgtgtcttgggtttgataccgaaccatggctgacaaaatctatcagttgttaaccaccctcgttgccttgccattcatgaaaccccgtattccaatatcgccatctgcttcagcccgtcgcttggatctgagcttcctcacacaaaccactttctggatgctgcaaacgggcaatatcatccagagttttggatatttcttgccgacgacattcctcccttcttattcgacaaggacggtcgggctatcccagaacaccggtacaatgctggtctcgttgttcaacgcaacgtctatcgttggcgggatagccctgggagcactctgtgaccgcttctccgtcacaaacatcatgctgctgtcctcggttggctcagcgttgtcagttgttctcttctggggtctggcatcgtcggctggctcggactcgtcgcagacagctattgcccttctaactgtcttttccatcacgtatggcttctttgccggtgggttcagctccacctggtctggggttattactcagatcaagcgtgactcggcgccatccctggataccgggcttgtctttggtcttcttgctggtggacggggtattggaaatgttatcagtggaccgttgagtacggtgctgattcaatctgggtctttgggagagagtggtctgaagggcaatactgggtttgaatcccagtatggaacgcttatccttttcactggcatcacggcctttttcggtgcatggagctggatgtggcggtatatcagccctgcactgcggtgtctctgttgatcgttcggaacagtctcggagtaggagcagagaataggagttggtggttcatagtaaattaagggaggacaaatgtaaagcgtcatgagtagattcaaatagcagctatctatggaaatgttttattcaatcaaactattcttttctggagaatgtcaattcttttctggagaatgtcaaggtgactcgagatgataataccgtgtcacgtgcagtccgcggagcttcgactccaaatgcgcgttcctcaatctcagccccgacaactttcttacatatacctgctgcaaccaagggccactgccctattctacaacaatggcaaccgaggccgcactccaagatcctctcctggcactgcgacgtgcgattgcctctggcaacctcccaacgccgacgacctcgtccgagctgtccgaccagcctgccacagacgacctggccaaagccacacacttctacttcgcccaaccagcccctcaaacaatcgctttgtcaacactcacacgattcatctcagcatctaccaaagcccccgttgacctgcgcagtattcttttcgcctggcagaacaaagatgtcgctatccccgagtacatcgccaaggcgcaggaattcaacgaagcgctgaagaagcagacgccagagggtggcaaggaggaaagtgttcagatccttatcttccttgagcgccttgaccttttcacctggctcgagggtgcctccgacgacagcgaacatatcaaacccctcgagggtgctgctgccgctgctgaggcagccgccgcggctgcaggtgtcgcgcaggccgataatgccgcgggaattgccgccggtgcaattggcggcgtcacgtccgtccccagtggaaccgcaggagcagcccaggctggaactcaacccggccgcccacaaaagcagattgaccctcgactacaggagatttacaatggggagcgcaagaccggcgaccgcaacacagtgctacgcggaatcaagccgacagtgagttactctctgacaggatacgatagacggtagcaagctaacgcctcatttcccaggacttctcacacgtccgcaagagcgccgaggtgttcctcgaccgcaaccgtaatcggcccggccagccaggtgtcaaaccaggcagcaagggctccatcccagctccatcagccggcctctcgatgccatcctcgcgcaagtcgagctcctcccactcccgccctgaccccatcatcctaatctcaccctccgcctcctccctcatccgcatgtcgaacgtcaaatccttcctcgaagaaggtatcttcgtacctccggaccacccaaccctcaccggcaccacagacgccaacctcgtaaagctagagcgaccactccgtctcaacggcgacgcttcgaaccccgcgagcgcaagctcccgcgccggcaaacccacccgcccaaccaagtttatcgtcgtcgacggcacgaccaacttcaaaccggagtactggaaccgactcgtcgccgtcttcacgaccggccagacctggcagttcaagtcgtacaagtggtcttcgccaccggagctgttcaagcacgctaccggtgtgtatatcggatggcgcggggaggatatccctagccaggttaagggctggggtcgtggagttgacacctttgctgttgagcgctgggacgagaagaacggtgtccacggtggtgggcgttggcgggatcgggaggttgttgagggtatttggactgccattgaggagggcatgagacttcgtggatggggaactaagtagacttttttttccttttttttggtctcggttcctctttctcggttttcctgtcatcttgtttatctcaataccctcaattctctaagaatatgatgaccatcggcattcaaggcgcagttttaggcgttgtggttgtcttttttttcttcttgttcctatcatgtttatgtatttatagctgatctgggctttcaatctgtaatttcgattcatatctggtataattcgtgacaagcacttcttcctcgggccaatatagccctatctaactcctagaacacaacatctgcctacattcctgcatactccattaactattgaattgcaatatatgataatataagaccgtattcattgcaattcccaattgaaggataatatgacatacacaagcagaccagaactcactcgctgtgcccggatagaacgatgcagggaaacttaagggacaaacgacggataggaaaaattgaaatcgagataaaagaaaaaaaaggacaaaaagatatggaatcatataacatgctcaaatgaaagcaataaatgcaagagataaagatgatgcgatgtatggggggacaagaaggacatgcaataaacaatcaacgccgggtctgatgctcaaaaggaaaaaagaaatataagaagaaacagcctccgatctttcaggttctcaatgttttgtttttttgtggttttctggttctgtgtttgtttcttttggggagagagagagatggatatggatatgggggaagagtgcgaagggaagaaagagtaagggaataaaggaaaaggaaaataaacaaaacaatgccatccaaatattacaaatattttccagttccggcctttctctataacatgagccatcgatcataacgtctttcgttcagctgagaatctcgtgacgagtggattaaaaaaaggaaaatggagatggcagccagccctcatcgagagagactgtggctggactgcatgcggaggagagagtaaataacttcgtgatcgggaacgatcgtgggcgagattgatcaaattgggtctcagggtcgaccggatattgtgtccccgttttgtatatggtgcgggggtttcggtgttggggccacaagcatgagagtgcagggttgcagtgcggttgaattcgatctctgccttggggaaggcgttcgaatgcggattgctggactgcatgtgtcgaaatgattcaggctgctgcaatgcaccgaagggctcatgaggagtcggaatcgcagtggtacgaatcgtcttcgaatgggttgcgggctatgtcaatgcttgtgggcggtgattgtcaggcacgggcagagcggctcatgctgcgttctgggatggcgggtggagcgggaggagcgggtggtgtgggcgagtatgaacgcgagcctccgatgatgtcgacatcgtgttcttgtagaacgacggagtacttgggatcgcgcaggaatttggggacagaatcgcttgacatcagcttaaacacggaagtttgagcaagctcgaacaggtgcaccacttcttggagactcttgaacatggactcgtcgtctcccacggccttggtcatgcggctggcgaggctgttgcggagagcatggtcgatgtttagttcacagggtgagccgggagccaaaaacgcgttgtacaatccgtatgctgcagccaaactttcccgcactgaatcgaccttgttgaatgtacccatcttctccgccttgtggtaattggtggtgaattccgacacatcgaggtaaaaagatagattctcttcacacagcgagtagcgaaggaactcacggaaaagcaaacgcagagcgggatcctggaggatatgggtcaatcgggcgttattggaatcgcgtggcatcccacgactgtcgtacgttggcgcaacctcgcgggtcttctcgcgggcaatccatccacatacgcgctgcccccgttcggtaatgccgtagatggcatacttggaaggctggaaatgagcattggtcccaacatccgggaattgcttgtcgtcttgaatcatcgtgatcaagccatacttcaggaacagctcggagatcaaacaggtctcccggcgctcgatagtagtcgaacaatccatcaaccagtccaccgatgcctttccggtaaatgtgttgctataaacctttccatccaggagtttgcgctcccgagccaccttcactccaaccaggccgttggtgtaatcactaagcgagtccgaatccgaggttgaaatactgcttttgatgttcgggccatcctgaccagcaaagcggcggaagatcacctagatcgtcgcgcgatcatgggacagcttgtcggtatccgtgtcccgctcgagattcaccagctgcatggtattgcgtggcgactccagtacatccatcacgtgacgagcggtaatgccgttacgctggcagaaacgctgcaggatattgataccctttggggtaagctggaagagggcgcccttgagcgggaagatcaaaagctccctgccgtcgacggattcaatgaagcgcgcatcgacaaatcgctggcagacggatcgggccatttccttggccatagagaatgtagtggtggtagtagtcgtaactatgcgggatgggtccttgggatcgggcatgcggttggactgggagaatttgagcgagcccaagttgttgatggcctcttccgaggtgaatgtgtggtcatatctagtgaaacgaacgcggtgcgaatccaacttcaagctgaccatcaatgtggagaacaagtccatgaaatcctgcgctgatcagcccaattgttctaattttgcaatcgcattccaatgcgagcctacctttgtgaatgggcgctcatcctcggtcatgcgcaacaaccttgacgacgtctgatgcattttgggtgcgggcggggaaggacgggtttcgtggggaggtgtaggaagacgctgaagagtcaagcgacgcttgagcaccgaattggcaggattgtcgaccaaggccggggacgaagggcgcgaggttcccgtcaattgctcgtaagtgtcgctgtcgaatggtggggtcacaggggttgcggagagcttatgcggtctcgacaggctaccgtatgaagtggaggagcgtactgtacttccagacagactagcaagagcgttggaggtcttttgagctaaggcagcaaaagaacgacgattgcgtgagatgataccgccaaaatcagaatcaggaactgaagggagagaatattctcggctgtggctcccggtttgggttggcattgaatggttttgagtcttcgggttgaaccagagggaggaaaaaagtggattatgccaaacacctgataccggaaaaaaacatgggaatttggtaaaataaaaaataaaaagaaaataaaaaagaattaagtggactaagtcctccaaggcaaaaatgtaaaaagggtaagaagggggacagcaaggaaattatacactatgacaatttcccattagtattattttctctttttttttcgaatcgatttcaatagaaaagaaaaggaggagtagagggaagatggggctaaaggggggggagaaagagaacgggattgaagagaaaataagaaaaatgatttttgcccgaataattgaaaatggaaatgaaaaagaaaaagaattaaaaaaaagaaatcaaaaagacaagaaaaagaaaagaagcgccattcggcctgtcagcctacaacatatgatccacagcccacgcgtgagccccgaaagagtttggcctgatgcatccaaacaacgtgggccatgaagatcggtgggttctggggtctggtattatatttgtaccataccatacctgcatattggctccctgggtctgcaacggatgttagctaataaatagctccctggtaattgcatgcaaggggggttatcaagtacaccagagccaaatgactgggagatgtgaataccctctctatagtccatagtcgatactcatggtttgggcgattccaaatcaacctatggaaccagagacagaaattaattaaaatggatccgcaatctgtttccaatgatttcattgattttttgcccgagttccaaggtcgaccgaacaaatccgtaatacgtgatactggtaatacctgtaccctgaacattgaacatggaaacattcctggcatacctcacccgttccattctgctactaccttactgccttaggactagtcgtctgcttttgagcatctggagcttcggagtattaacgggtgaatccagatctaaatcttcagtgttaccatattagtttgctgtctttcaatagcctcctccggcttcgatgggatagatctgactatgtcatttcacattcgatgtgtaagctaatcccgacaaaacaggtaatgatgtgaaagcttgaatccacgtggaaatccctacacttcccgaaatctaaggttatattgctaattatgatacatatctatgttgaataatcatcaataatagctaccatgggagtcattctaaccttatcaagtagcccttggcaacctagatatgacaacgggacattctttgcttgttcctcatccaagccacaccaaacctggaaatagatcagaaacattgttctatattggacacatggttccgggctgttgccggagagtgggcgttattgtacctatttatgttgtctccagagaatcagaaacatcctcgtacatatattgttgtatcacatgtcgccatcgggtcaaagacccccacctcactccgatcgtccaatggtggggcaattaggaacttggcacgctttcacacttcttccctgtttcgtaccgagcattgcggtgtttcgtcttgtcgctaatcctaatttggaatgtcagggaggtctcaatccgaaactatactaattgtacagcgcaagaagacaacatgatgattagttactaatcaatatataatcctcattgtcatacacaaggttgaatgttcatagtggggggaggggtatattatttcccctttgaggaccttgcgtaactagaaacatcccaaggcggtcaaaatagattaataataatcctaatctccaggcttccatggcaattccaagcgtcttcttttcgtttggtgtgcataacccatgtggtcccacgtgggcacacgtggagagagatgcttagcgtctgaccgccgaatccgctctcaactgttttgcgcatagaaaggaggcgcagcctcgcgaatctttgccgaatgtctcagttacgggtcgcgatgggcagctagcgctaacaagttccaggattttaagcgtgaaattaccctatcattcaacggttttggttcgcgtctccggttcctggaaaaagcgggtttcaggtttcctccccgtccagttttcgcgaaaacacggggttttaccgccttgacgaaacaattgacgccatccaataataccagagacgcccctagtgtcgcatacccgcggatcatgatcgtcaatcatcgcgttatcatttcctcatggcttgcaatacgtgaccaatacgcagtgaggcaggggtcgccaatctccgtggtcggggaccaacgtcagcgagataacgctaagggttaacacgagagcctcatcttacacttccccggtaagacagcccccaacacgcacaaagacggccctaaggatttcacttgcatgaaccgcgcttttaattggaagtttcagaaaagccattcaacgcccccggtcaagctatcagacacgtcagcaagacccgtgctgaccaagaaacggtgccggccaaccaaacctcctggaacatgtcacgcgaaacaacaatgcaagacgttagtgcgagtttcacccgccagatgccgactttcccttgactgaccaacaatttcctactccgtccctacgatacgaattaccagtttagtattccctatggagtagtcctaaaaaaaagaaggtttggactccgctcaggcgcggccatagagacagattgagcaaagatactccgtgatatgatagcatatgatatgagattggctcccccgcaagacgagattagccaacgaaagttaaattggatagcgcagatcgaagaactcattctactttgtacaacacaggacagaaaccttggaaggagataagaacattcgaataagcgacacgtcatatcgacatactttgcactatgtattgagatctatcgcgcaggatcgatcacaagaacgcgatcgaacggtgccacgtgtattgaaggggaataaaactgtttctcttctaacacgggcagctcgccggaaagggagtttccggtcgcgacatctcggctcagccctgtacgagcaatgccgatttggctcatatcactcccgtgtggctctagtgagaatgatgggtttgctagttgactagtcagttggttggtttcaaggagtctgacagaaccaagtgagcaattcaaggagtgggttagccaataattcgatatcatcgtacggggtaactactccggaattcgtatacgtatatactatgtagattactttcaatacgattagtgctcgcacatcagatccattattgcgagacgctaaactcgaagagaattggtggaaactatccctgtcgctttgttccgccaggcatgtcgaagtggattgaagctatccaaaattcagccccgcttacagattggctcgcggaggttttgctgttcagagtctaaagttgcggtcagacattcaacggtaagtagaaagatatcacttgagccgaaggagactccagggaccctcttgacgtgatgaggtatgtatcgttgtatctgacattacctctatgtaatttaagccacatggtattgtctttgtccagggtgtcaacatccctggcggccacgcgacaagggactcctgcaggcttgcattgttcaggggtaaaagacaccatctgcatatatgtaaattataacgtggattgtacaagatacacgttttgacacgagtcatgaaaactcaaaatcaccctgaatcatttcagctgccaagatgtcaatcctattctttcgggacaagtctgcatcctttgtttcagggccagggctgtccctagatgtcgatccgccaaatgaaaagcttatgtacattagctagctctatgacataccttgcctaaagatagaagggaatctcatattggactcccgtactcgacacaggcagcttactttcctagccacatatcacctccttgcctattcgagggtccctgcatgtagcaggtgtgcttcgtacatactccgaactgcatggttgtatgcagatctccacggaattcagggactcgacatccgagagttaattcctgttctgtaggaatgtggcttgcgcgattgggattcgaactatgcgctgatgctccctgggctgaccatgctaaaccctaaacatctgaaccctggctccggggtgattgctgagtaaaggatttagattttgaccaggcccggggtagagaagggcctagatgaatctcgaccttcgccttcactgccccttgatgcacatcccatactgagttcatttagatgttctagatcgcaatatcatatcaaccttcaatataaggtcgatcttcgctcccgaagacccatcagcagtccagatttaaataggccaagaaatcccgaggctacgtatcacattgcagaggccgaagctgccgagagctacgaatgtgggggaagcatgactgatgttacagtgccacgtgaaatgccggagaggtcgacaatttagacctcgagcacagatctatctgatcatcctctagttacagtagggcgaaacttgtaagcaaggtgtcgacctatccttcgcaagtatgaccccgtaatgggaccatgtggcttgcgcagcgacctacccatgtctagtgaaaaccctgacaaagtatgttgtaatgacagaaactctccttgcgactagcgaaaacactagtagaaaacaatcgcgtgcacgcagcacttcgtgaacagagcctcatgtctcatcggatctgttgcctattcggtaccatgctgggggagattgcacatatctatctctctggtacggagtagcggtgctgatctttaattttttgaaccctcaacaaacttaagagctttcaccgtgtaattttgcctcacctcagttcttctcggacatcccgattttttgcaaaatagtctgagtgggtcttttcgcatatgtatatgcaaagaccaaggttctgatctgcggccagatacggagataagagaaggatcttcgatgtagcgaagttgaactctgtttttcacaaatgggagcaattcgagtgcacacatcatactcccgaggtccttataggccgtttgtagtaatatcccttttgcccgtgtgtattataccggtgtatcataccgccacctgtatatagaatacgaggaattcgactttacccgttcgtgatgggctccacctgctgaaaacaggtagtgtagggtggagtgtagcagtgaaccacgtcatagactttgaatagttaaattattgaaccaagactttaaaaaggtggccctgaatcatgtacggcatccacagtcccggatttacgttaacggcgaagtccggcgtggcaaatctgtggaaacgctagaagtcttctagaatccttctagaagacgccaagaagccgcgtttcgggcgatccatggttcagcgggccaatatattaactgtttcgtctgtttatcccctttctgttgataaaggggctgtattttgggaaaagtctattctggttccgatgcgttgtttcaatgttgtttttctcctgttcctgaattccgactgatctcggaatacaactgaagataagggcttggtgtcaattgtaaaatgtcgaactatattcgcgctaggcattacttaaaatgtctgccaaaccaatgagacatctaataatatacgatacagaacaaattcatacccaagagtctcatgttggatctacgttacttgtagatctacaatgtacgtaagaataaggccgaaagcgagaaaacaacaaacctcttacggtatggagtactttgtatacccactggtccaccttcacggtagacacggcagaagagccacacgggaacaaaaggaccttgaagtccacgtggcagatcggcaaaacaccggtgacagagagaataatagccgacctacatatcaactatagccctaacctggttagcctgtgaggtactagggagtagctaaattatggcataaacacgtgtattccgttctttccatcttgattttcttcatgctctcatttactatgttctagtagtatattcaaacaattgggactaaaatcaagttctttcttgaagacgttcatccaatactcatttttcatacattactccgctcataccaatgatattagtttacaaaattatgttgggcatcccaacagccgcacgagccccaagaccaaaacaaaattacccaaaaggcatgtatcgttccaaaaacgcagcttcaccgcaagaccaaagcaaatctaaggcctggtgaaagtttgcgggacctctctcacacccttccaacacctgccctatcttattggattgggcagccaaaagcgcctgctcaggaacagcatgaaattgtgctgctaactgagtagcgaattggtcggtgcgctgcctttttcgcagccataagcagtgggtagatgtgacggcctccaggattccttatataagcgtccgctcgctccgcagcattgagggcttcgtacatgccaccacccgtaggctcccgtagcttgttacacatactccgtacttggtgggcattggttatctttagtttccgaaatatccgtcattatctgtctctgtgtaatgcttgaggaagtgaggaatcttacgagggtcttgctggcacatcaaaagcgcatgcttgggtctgccgctgttcggattgcttgttccacagacactcgaatagaaatcgcttcttctcctctattacagttcactatatatcgctactatatgcttatgtgtttgcttgctcgcttcctgtttgcattgtttactagtttactttcatatattgcttgttagatagccaagcaagaaggttggttgcaacgtttgtagaagcgccaccctataagaatagaatttgtaggtgagatcctgtatcctattcgggcgaaaagaagccgaagacaatatcaaaattctaatgaggatatacctatagagtcactaggccttccgcatatcaaaccccgatggtcctatacgcgagtgacgagattggtttctgcactcggagagtcaaaaaaagtacctggcattgagtcaggttggagtaaatcatagaacgcattcatgaatgatgtgaatcatctattggtcggtagggacggactgtcgctatccttgagtggagtctcaactgtcgaacaagagtcgtgagtggttttttggaattatatatacagaatcgagatgccggtgaagccaaagagggacgggaaattagttcttcattcagtcattatgattttgcctcacgagatgtccatatccaagctaatacgatatttactttactaggtttagtgatctcatatcgatcttgcattgaaatcctagctgagagaaaaagcaaatctgtataatgaaagatcggcctgagatgagaatctatgctaacctatagtagcaggctaagaagatcagggctattggctgtcaggtagctctatgtgaattgatataaaattgaggtgtctaatagacaaaggcttagatgataattgctaatctgttatgcttttcaataagctacattctaaagtctctgtagacctctcctaacatgccatgccataaaagcacctatcaaattcctccttgcgttcaattcaatctccaagtgcctttgttgagaccatttctgcctcaggttgatgagacctactttctaccttgtttgatcttccttctttctcttagccagctgatacaacataacccaaggtttcctttatcaacaagcaagatcatttcaacaagcatcctatttcaaagtaagttctcctctattcgaatcagggtcagtgtctagttaactgatcacctattctttaaagtcactatcatgaccttcgccaaccagaaaaggaaaactacagcctagagcgacaagtgaagagttctacagctcgtcagacatatattattggaacgagcttacgtgcaaacgtccaacctctcatccaacaaccccgagcaaccagttcatacctcgccgcaggtatcgatgaaacagtgcatgttctaggtctgtcgctaagccagtatcgccaaccctaaaaactccatataggacccgaaatcattgcgtcctcttctactgcctccgaggctcagtatcatatgctgcgatcctacatgactcagatggcccaacacattctctgcagtctttgatcaatatgtcgaattaagtggttcaaatcagccagtactgcaaaccagtgctgttttaatatggcgggtgttgcagcctaccagggcgattaaaatgatacttgatagtggattggcttcacccactgctttttcatgcgaggaagcagtccaaggagggagcgctttggaagaccttacagtttcgtcacgaacaactggcttgttcaggtcgtcaggcttttgggatgatttgttcaattttactttacttattttaccgctaattcttatcgtagcttgcaccaataaggggcaaagtactcatgaaccaaaatgacccctaaagtgtaccgaaaaagacatgacaaggtcgtatgaaagaatcattttatcgcgtggatccctagtggattctgagctatattagtatgaaggtttcagggatcgtcatgcagttatcgcaaatgcgataaatgagtgggactgtcgttgccgaatacaccaaactctctaaatgacttgcatcgttatcttgtggagctttcacccatgtgggtgctgaagaatgtagatcagtcggcattgtttgatttgtcattcctcagtcactcgcattcgcattatggtatgaccagagacttgctctgccacgtccagcgtagaattcggtgataacagccttgacttgcgatacggtagttttgcgaaccatcttgaggcagataaccatgtctagggtgtatctcgcaaggaaaaccgagaagttgtatacgttgtaagataccgctttgaggaacaataatccgtacgccatacataatactctaatttgagcttaatgctattatcgtacgtggcaagccgctcaattactattgacggaaatatttccatcaacgacatcagcccatttgaaatacgtcggtgatgcttgaccgtcgttttccgctactgcagggaagacggaagttggccgatgatcctaaggaaaccaaatccaatcaaatcacactccgtgcacgctcttcagttgcaaagtgccgagatcgtcgttgatatctccctaattaaccccaagcctaatagtctaactgtccgacttgagataaacctccgatcatccacttgttttgactttccttatccctgcaagcgcaaaactagccgtcttagcgggtcaagccacgaagcctgaagaaatgcgaaaaggacgattctaactagaaggagacgttctacttttgtctcttctgacaaagcggggcagtcagcgcgaagccggtgaggaggagatgcttgacgttcgctgttctcgtacggcattgcagtggattatgcattttgctatccttgtctagcatctttgcataattacctatacgttgcacaaaagctccttttatcaacatgtcgtgccaggtctaatttaccttctgaaaccgagtctcctatttccgtcgcaaccgcagtccggcccctatctcaactgctgcaacatacatacccggaaagggtattttgggctatcgcatggtccaatgccattcgggatttgctttgcacagccagactgcgccagacacatggtcagccatgcttggtcatgctcagcaatgcccagacggaagcgagcatatcgatctgcaacctgcagcatgacctgattattaacaactagttgagctctgggcttaaagagctagattactccgtatacatcgaagtgcatcagagccatgcgagtattgcaggattgtggagtcttcgacttccctcgctgtatttggctccactactcttcgtttcacctccagttatcacgacgtcacacacatccaataaatagtaacctaagtatcaaaaataaagcctctccgccatatgaattgaatggcccttggcatcctgcagatatcgcatggtatcccagtggtcggcgtcctatatgcagagtaatatatgttcaacgcacaacttaccatactaacacagcagcccctccttttaccatttgtggatagagatatgagagtcagccatgtcactttgaacacatggcaagccacatgcatatgtccgaaggccgcgtgtttgggggttcaattaaatagagtacagaatgtcaacttagaagaacagcatttacggggtacatattcccacaataaatacctttttaccttttaaaagactgtattttgagcaaggagatcaccacaaggcagtaagattcgaaaagctgccagcattcccattggcacagttgcctattagaagtacatactactggaatcaaagaagatgcaagatttgtctctatggagaatcaatcagccagttttgagattatctatgttgtacatggcattcatatctaaatcccgatatcgctaccactcttttatatatgtcataggcctacgcagatcatcagatcatcaaaggctaatcaaatgacatccactgcaccgtctatcatctacaactagcttttgagttatagcaatattacgtacagaccccctcagagctcacgggtacatgtaatccgtatcccaacaacgcgggagtgtgcatttcccatcaaagacaaggatgacgtgactgaccattctcagcaactaggatagacgatggaaaatgatgatcgccagatttaaatggtggtcaggtaggtttggggctagtgaagttttccaataacttgaatcatggagctggggggtgcttgcttggtgtttgttgtacatgtggttatgtacggagtacatggtgttttgatatatccgataccggccgtcggcttgagttcggggcatatgttggggctggtatagatcccctaggcttggttaggatgtgtatatttccttgtatagaattccgtaggctgcttgtgtgtgcgatgtgttttgtttatctttggttgtgttgtgttgcgatatcaattccagaatggagaattgggaaattaattaagatgttttccgactagcaactcatatcatgatagacggatagtcaaggccaaatgccatgcttgtcaccggcacaaataacccaacacagtaaatgcttgcaagatccacttgctgagaggtctatccgcgccaccactggcccaatgcacccccagagccagccatttcaatgacctcctcgaaactaatttccacacggaacatctgcccgtcagcagtgccgttcccactacccacgggtgtcacgagtccccagctgagcagtctttcccaagactctcgggccacatctcggccccagacacggcctggtgtggcagaagctcccgacaccgaggcagatacctttgcggatgtcaggagccgaacgtattctgcgtatgcggcggggaatgaaagcgcaagtggtcccatgctctgtgactgggacccgtcgtttccggggtcgaacagggctgccaagcgtgttgcggctaccaacaaagccagtggcaatgacgagggactggatgatgtgatggatgtggagaatgggagaggtgctgggtctgggcactcaagggattgggaagagaagcttttcggggttgggacttcgggtataggtgcgtcggcggtcgacacactttgtagcaagtcgctgatggggagaagcgcgctgttgaaaaactcctttgctgatttggtttggttgtagatacgcttgaggtggaattgaaattcgttgtcattccacaaatgctattttcaagacagcgatttagcaaagatgcaattaattggataaaggaaaatacagatcttaccttcaaatattccttccatcccccaagcagtgtattccacttgttcgactctactagaatgcgttcagacccaagttcatctgcaatatcaaccatttcggcgtcactgagatccaggctccctaggcagatatctgaaaaggcctcgaaggatcgaggtagaggaacgtaagtataacgatgactaaatcgactcttgacacgcttctcgagcatttcggttacgtcgacctttgtcgtgagcccaatcaccgcgatgggggctttgcgggcttgggcaatatcgaacagattatacaacaaagtctgtcgtgggtgagtgacgaataggtcgaactcatccaacaagatcacaatggatttcgcagcagtcttcgatcctgggtccccagaagtcccgaagagttcctctggatgtgacaataaagccaagagcgtggccatcgtatccgcataagaactgaccttagccgcatcttcctcggtatgcgtctcacggccaagttggcgccacatttctcgcaaagctagacggtcgtctgtgtgcaagaacccattgagacgaacgacgtgaaactcattgcaatgctcctttctaagagacgaaatgatagattccacaatcgccgtcttgccgcatcccctggatccaagaagaagcatggagttgccctctccgatagagacggtctgttcaatgagctgatgaaccttctggtattcagcttcgagtccccgcactggaatctgtcgtttccctgtcagcttttcgagaagaatagtcgagagaatgcgcatttcgtccccaaggcccgtctgacagagcgcctggaattttccagcatattccggcaacggctcggagacatcgatagtctcatgcgcctccggctggtcatgataaaggtcttgctggagttgtattgtatcgatgtcatccaagccgtcctgatacccaggcgaaggtgacttatctttcggctctgcgaccaaggctttcttggatctaggcttcgcggtgcttctcttcgatctggtccttgtaattgtacgaggggcgggttccggggacggctcgtcgaggtccatgtcatcatcgtcatcatcttcctctttaaattcaggttcgtcttcttcttcgtcttctaccggggattgccgcagcttttgcgcgcttcgtgtgggacgcgcacttctcgaaggagtggctgcttgttttctcctcgatgagggtgttacggcttcttggtcgtacctttttggtgttttgcgttgccgcccacttgaccgtgtcccaattcgtgcgggagtttgtgcttcatcttcctcaacctcgccgccttggcccgtcgttacggggtctgggttgtctccgcgggtagtttgacgccgcgatgcacttttcaccggtgtgggagaaattccgtgattgtcgggggatgtcgggacggagaatacgtcttgatcatcatttcccatatcgatgtctccatcaacgtcctcggagacccttctcctcttagatgctcggggcatggttgtggtttgaggaaatggaatagctggtatcgggtactttccaattcgatggagaggggatttcgtgagggtaaaggactcaaaccgggaaaatctggcggtttcctgtcagataagtgtttgcgcctatgtcaattagaatcagattcaatcaatgctgtttatttccgaccagcctgagtagtccaggagctgtcccaccgaatgtaatgacttacaaagagaaaatcaatagcgcatttatcgttaatcaagaccaacaagcgcaacccgtgtgaatcagattccaacagaagaccgggattcaattgctggtcaattgctcaaagggtcggccggacaacaattggccgattttcgcctcaggccgagacgcgtgacgcgaagtcaggtgcttcccgaggtcactttgacaagtcgcaacttggaattgctctttcgttaatattgtcttactgtagggatcagaagtctcaataaccgggattcacagacaaacatgaagaactgaagtcgaactgtaccgactactagggggcgggtatagcaattctcctgaagaacgcgacatcatttgtcaacgctacaaaaacatgactgccaatatcccggagatcatcctgctctgccaggacgcagactttatcaccgcctttcaaacagcgcagcaagagcactggcccgaattaccatcaaagctcacgatcacccttatcaactcgcgcctgaaccgccttgacccctcagtaaccttcgacctaatcgtctcacccgcgaactcatatggccgtctagatggaggctttgacgacgccatctcattagccttcagcccgcgtgatgactacgaagctctaacgcgcgcagtgcagctggagctatacgagaaatggcgaggattcgcgccgccaggcacatgcaggctcgtgcaatttcctgggccgcttttgcagaattcccggcgctgttcctgggtggctatctgtccaactatgcgagagccgatgaatgtcgtctgggaccgggaggttgtctatgagagtgtctggagtttgttatgtgaggtcgaggggcgtaatcgggcctctgaagagaaaattaattgtctcttgatgacgccccaggctgctggtattgggaaggttagtaaggagcgttggtcggcacagatggtgcttgcaatgaaacattttgtggacgcagtcgaaaggccggaacggtggagtcgaatgcagtggaatgagatcatgaaggattgtgacgaagttgcgacgacatggaggacaaaaggagcagcatagataaactcgttcccaattgtccttgtcgtcttaggtctgtatgtaagatcatggctagcctgaatgttacacttatgtttcctacattcatgagatggaatttggccgtgttgatgaggcgctgcgagaaaacgatgacagcccaaagctactaacaaggccacccattagtaaccatggattctatgtgttgcgggaagattaggttctctatagactgggccggggttgagcctgggactctacaagtggatgccaagtatagctttgccgttcgtggaaatcagattcgcgaggaaaaagaagtatctcgattatttgggatatccggatttattatagcacagctggtctttgtggagtactaggaagtgaggttactcatgacggatatgtccaactgctcctgctgtgtcaatgtacgattgagttggaaactgcgtaaaatgcgagcgttggggagattctgtgcctgaaccgaattaatgaattccgtgacactaggatctcctgtagagttgagctttgtccagccaatatgttgaattggagcagaaagcatctaaagctcgtcagcgaagccgcgagaagggatattccatctactgcgtggatgacaggttgaatgtcaggtcaagtctgggagtagttgctatagtatatattgaattcggagagatgaactcttccccaatttaagcatatctgatccgttcgaggtcggcttcaccacagccgaggtccaatatgatgatccgagctacggctgtggggtttagccttaagctacttctactccaacatttcttccccctaaacctttctagtgctctttgcatttgtcattcctttcagataccatgtcacataacgcaataagcgctccgcccaggcaactggacgagttcgaacagctcgtctatgagtatacggcgcgcatgggcctggggaacgaggaagtaagtaccatacgcagcaatattaaaataatgaattgcatcccccgcctatacagcgccagagcgcatagttgaatcccatcgcttacccttattgaagcactgggacatcgatgcccgcggctgtaacctccgcttcgagtccgcaacccgtggtcctccggctacagtttcgttcctcttgacgatcactcctgcgctgaccaattactttggtaacctccatgggggctgcgctgctactttgatcgatgttctatccaccactatcttgttaggcgtttccgagccgggcaggttctccttcggaggtgtcagccgcaacctcaagatcacatatctgcgccctgtgcctgcgggaactgaggtgcggctcgtttgtgaggttattcatgttggcaagcggttggcattgcttcgggctgagattcagagggcggagagtggtgatgtttgtgtgattggtgaacatgagaaggccaataccgacccggaggtgacgcagaggatttgatttgatgtgatgattttgtttctttttttggtacgtctagaagacaacatggatcttcgaatgttaagaggtagccactgggatataaatttatagatctcatttgcaccaataaaggtgccaaattcaagccattgtacgagcgaagatcatagtagtgaccagaatattgtgcttcgtttgctatgatagggaaggacggacaaagaacagagaggccatcgcacatgttcaagagaaatataatcaaccaatctaagcagtactagattatccgattgtaagtcgagtatccctctttactcggtggccagttgctggtcttcgcgcagaccctcaaccttcaactcctcgccagtggcacggcgatacacatcacggacatcatctgggggaattattagccagctattaatatattttcaatcacagatagcttaccggtcgtagtctcgaagtgtgatgtcgcgtcatagctcttagaaatgaagatgttggactcctcgccattgtcggtgggctcgtagagaggaatggggggtcccatgaacttttcttcgatcttgcccagacgctcgaagccaggctcaagctcaaggtggtggttagcatcgttctcggcgatggtggacacaatagcgacgtagtagcccttggggcagacgttatgagcggacgaaaccatggcaatgtaaatatctgaagaggttagtgccctattgataatgactgtatatatataactcaccatgcttgcgtccaacctgggactggggaatgatcagctgcacagagtcactgctgtcggtcttatcgatggggtggttcaggatgcaaatagccttgagcaagtatccggtgaccttagtcttgtcggggaagtaagaaggatcagcgatgatcttcttagtcttagtctcaaacttcatagcttcggattggtcgtcacggtccttcatggttgccttgattccggaaaccttgccgttctcgtaaagcacttcgtcgacgtcggtattcagcatgtaggtaccgccgtagatggcagacagacgagcgaagccctggggcagctcgccgaggccgtagagagggtagatataaggcgactttccgtagcgtgccatagagttgacatacagacggatacggttaatggtttcaacggcagcgccagtctggttgatatattcgtccgaggggtacaaagccatggagtgaccgacgaaatcacgagtgttatcctccaggccaaacttgtcgtaaacatccttcatcgtgcacgcatgaatgtccaatcctgatctccattagctatccgcttcgacgagccccgaactgacctaggttgcaaatacataccctggtgactggctgggtcgtcttccttgaaatcaccaacccactcgaggaacttcttggcgcgtcgcttttcgaacaagcccatgagcgacgagcggagagcttcaccagcatcggaaggcaccttggccacggtcgccttgggaccctttccttgctgaacgtagctgccagcaatctgcttgaactcgaggtatcgggtaacgtccgtggacaccaaaatgttggtcaactctccattggacatgagtagcttggggaccaagtcgatgttccagtcattgaccctcccgtatttcttccatggctcctcgccgggggcaacgttgccgtatttcttgaacagctgcaaagggtgtcaataaggtaagttgggaataaattggtgcacatactgcttcgatgttgacggaagctgcttctctgtgaacattgtgagctattttgatcttggtgccatcatcgtgagcttcgccgacttaccctccatagtgatcattgcgatcgatgtgaaggaccttgttacccttcacactgaggacactgtagtcgaaaaggatgagcaaatggtggaatcatcaaagcccaagctcaaatacctacccagacaaaacacactcggtcaggcctaaacgaaattggtcagttgttgacgttttgaggggatggcggggtagcaacataccagtgccgagcaccacaacatcgtattctggggcgatctcatccataatgaatatggaagttactagaggtagagaaaaatagagagaagattcaagagaatgaggagaagagaaagttgactatctccccgcggatcggtgagaaaggggaactatttgtcggatccgccactagtgaattacctcatgatattaatgacatgggatattttggcttcaatgaacccctgaatatattggattgtttcagctcaggggtaagtctgatttgattcccgatattcttaggtaccgggataagttaaaagggatttgtagtgtcagatgatggaccatctcttatatattctatgtataatttgacatgcgcactactaaaatcaccttggaaagctaatgttacatacttattacccctggagattcggcttaagtctccctcgaccggggctgtgtcttaaccctctggtcatgcttattgttccttgccttgggctgcttcgttgggctcctgctcgatctcagcatcatcgagcccgtagaagttctcagggcggtatccgcgcttgtacatccgcgaggcgtcctcccaagcataccagcgttcacgcagaacgtgcttgatgttcttcatggtgcttcgaatctatgatgaattggatgggtcagtcgagttcaaataatctgaaccaccaattgatggtcggctctgaagtaatgaggaaaagtcttcatgcagctttccaatatatgtagatgaacgagatgacctatacagccggggaaaaactcaccaccttgtcccgttcctgagattcaaatccaccgtagccagcctggattctttctctttcgaaatctgacgtagcaatgcggtttcgttcacggacgcatacatgccacagaccgtgcaagtcctcccaactccgttcgcggagttcttggataccccacggacgacctagattcccaacatcagcactgtccatagagcattatagattcgacatccagaaaactaaccatgagcgttgtcataagccggggtaggtaatgcctgccggttggggggaaagaaggcccagagtccatggttggggtttgtttcccgcggctgcatgtctttcggcgacacaggtttgggcaatggccattttgacacagtgaacggtgttctgggaccggttcgatggatggccgatacaccacggtttttgcttttgtcgcgtcgagggttggcgccgacggaggcagtggaagaaaagctcgaagattggatggctgacagggtcacggaagggtgaagtgacggcgcgagataagtgggaggcaattcggcaataaccagccctctcaggcggctagcaatgcgtggaacctgctgcatgattgtgatggctttccccaggacggtccgagtcggagattgatggcctttcttttcgcgaaggcggcaaggctagtcacgtgacaaaaccaaaccaagaccagcttggatgctattagccttgggttcatcgggttcacgtctttttttttcccgagtcactcttgcttgttttgattccatctttattccagcaaacgacagcttcaaaaatctatcctaaagatatctttaatctttacattttaggccttgagctgcggttaattgcagacttggcctgtgcatccgcgcgtctaatcacccaatcgactactcggcggagcagtgccgcatcaagcgtgagcaagaggcctttgtggattgctctcccctccacagattcaactccggtctattactcggccagtctgcttttctgatttttgacgtctcctggggtatcggaaattaccctcttcttaagcaacatcgactatgaataggccaggttcgtcattttctttcaatgccttcgcgatccctcatgcctttcttatcttgcacctacctccgcggaatacttgatataagtcgtacttgcttctgtgctgcgatatactctccttgatagtgggagttacccagcattgtggaagcgctggggagtccaatggcaagccttggtgcatattgttctacatttgcgaccgagacattcgcaaggacatgcccatgcattcctatggtgttgatctgagcagctcttgatgcgacgatcgtgctgacttgtcacgcgtgtgtcaggacctggcccgcagccgctaagaggcatgtccggattccccacgcaacagcaagcacaagctcgaactgcatcattagcatccacgcgattgtcaaacgggaaactgggtgcgattgcctcgagtcatactttctggacactcaagatgatttgtatgaagggatgctaacatgtgactcgaataggcggcggtgccaattggagcttcaatctacctgttagtggatcatctggcctaccgggcagtcagcaacgcacaatggggaccatgggaagctttgcgcaaagcctaggaggatctcaatccgcagcaccacttgatctctcgtaagtgctcttttatcatggtttgcagtggtctcctgtatctctaggccttccgatttgtctccgaactgactaggtcggtgattctagggagttcccttcgctatcaggagcatcacagcaatcacagtcacaaactcccggtcagctaatgtgggccaacgcaagtcaacgcgctgctcagcaaacacctgttcaaaggcaacagctccccccgacatcgcaaaccccctcccgttcctcccaaccccaaggccttcctacaccccaacaatcccaaccgcagcatgatgacatgtttccctctggctcgcagtttgccaatcgactcgatgactttagaaatggtggccagggtattagtagtcaactcggtgcaggtggccaaccccaaacaggcaatatcgaagagtttccccctttaggccgcaatgctgctgcggagcttcctctcggtcggactggttcgttgatgcaaggtgcaggctttgggggttatggaactggtctaggggcaccccggtcaccagtcagtcaagtgcctaatggcattctaggacaagagaaagcagtatgtgtctacaattgactcactttctaggcagcactaactttacaacaggacttgaacaacggtgtgcttccaagccagcgtaactttagcgatccacaacaactgcagcaaaggcagccagaaaatattgacggacaagatgtttctaatgcggctcagaatactgagcaaccacccctcgcacagatgagtgaacttgacaggtttgggctggcgggtctgctgcgcatgattcacagcgagagccctgatgttgcaagtctggctgttggccaagatttgatgacactaggattggacttaaaccaggcagagtatgagctcctttgttcccataccatttataatactaattctttgcataggcctttgcacacatcgtttgcttcaccatttgtgtcgtcaatgtcagcagtccctctggaacaagacttctctttgccgggttgttataatgtggccaatatccaacccctccagtctcgcattcctgggtttagcgacgagacactatttttcatcttctacagcatgcctcgggatatcatgcaggaactagtggccgaggaattgatgggccgcaaatggcggtaccataagcttgagcggtgctggctgactcgtgatgagacatatcctggacctgttgatgtggaacgtggtgtgacggaacgcggcgtgtatcttctatgggattcctccgcctggaagaaggtccgagtaagtaatattcatcccttgttggaacttgaagaactggttgaactaattttcatcacagcgtgaattcatccttcgatatgaagacttggacaaccggttggatcctaatcgaggcgccgcccgcccacctggcgtggtgcatcatgcctcatgatttgaacttgataccaaggcgcatgcagaatacaagcaatcaaccatggcgttcggtttactggtctgtgttatattgctcagggatggccaatagtacattaaccttcgggaacaaggcgcgttgatttctttggtattaaagggctatgtgggaaaccaggacacgatatttgaaaatcaacagcctatgtgattttgtcacaatgctgtaaaatgctatacatcgctgtagaccactctattcactacctgaatggtttatccgtctagcaagacttgcgcgctgtagacagaatagccatccaatccgtatcgatgttcccatgtccgtaagtgtcttccaagtacttctctaccgccgggcggacgttatccgtgttttcctcccgttgcttctcagtccagaaggatttcatcaacacgggaagcatcatcatgatcatctccaccaagataggggatgtcagggtcagttttgttgttatttcgcggacatcgatgtcctgaagcccacgcccctcgagctgggactcgatccaaggctttgagtgccattgcccatcagtgatgacccccaagagctttggggcctcgggaaaaggcaggttgcctggcatgctttcaatcacttgtcgggcgatggggatccagccggctgtttcatgtcagtgaagttattacccaagagaatcgttccaatacttacgttggatccaagttgagaaagcaatagtcccgccgggttttagcattccgaccgtctctagtggtttctattagccttgaatataataaggaaatgggcaatgatatacttaccattgagagccttgagagactcagggagtgtcatataggctgcaaaagggacatagcagttagccactgtcagaatagaccggagtgcatccatgaacccactcaccaaaagcagtgaagatgtgagagaattgaccgctaggtagctcaggattctgcgcatccacaatctttgtctccgtgttctgccagccctcttcttgcatacggtgcatagtgtactcgatcattgccgacgagatgtctccacaagtcaacttccacatcttcttgacagtgtcatcaagcttgccattgagggtactggagataacaccagtgccacaggcattgtcaaggaccactagaggctgatcagggttggccctggactcggcggccaccttgctctgctcaaccagcgtttccgcaaatggccgggtgaccatctccgcgcgtctaaacgagctggcatattcttcgctcttgaagaaagtattcatgtcgactttttcagccatagttggtaaactgcaaggtaattgcgtatcgtagttattgaagttgataagtgcctgtttagaaggaaccctcaatgtgatgtgatgtgatgcaagaccgagatcatgaaaagatagaggtccttatgggtccaggctgttctttaaatagtctgcggtcgcctaaagctcacatggtttctgtaccagaaattgttgtacgatatagaaagtgtccgagaatgtctccgcgagtggatttcagtcgaggcatttgtaaaaacgcaccttcaaggggtatttagtaactagaaccccttactgcgccttatttcaatgctaccaatggaaattattggttgggggcgactcttacgcagtcacccccagggttccctcttggtagatcgtgatcattatgagtgtattggcaaaagaaggagccatgcggagtcgaagtaaaagcggcaaagtccttcacggataccagttatcaaatccacaattttaatcgtcccaatgtcagttaatgcagagaggtttaatctccagtcgccgagtgccattttttcatacttcgatatcacgtgagaacaaagcccccgcgctgacatcagcaaaacgacgccagacccaaatgggcaaaccatcaacagcgggtgcgggaaaacaatcaatcccctccactccccatctggtcgacctatgcactctgctagcgagcagaacaccgtttcggagtcgcaatcatgaggattactgaaattgtcatagatgtgaggttcaacattgctccatcgttattcactgcgctaactaggtcgtcagggcttcaaatcgtacgctgtgcgtacggtgatctcgggatggtatgcaatctaccgcgtctaagcatgaatgaaattatagttttggcttaatcttgggccgatcggatttgctaatcgcgcaatacagggacgaagccttcaattcgatcaccggccttaacggtagtggtaaatccaacatcctcgatgccatttgcttcgtgcttggtatcaccaacatgactacagtgcgcgcgcaaaacctccaagatctcatctacaagcgcggccaagctggcgtcacgaaagccagtgttacaatcgtcttcgacaaccgggataccgcgaagtcgccgatcggattcgaggagtatgcgaatatctccgtcaccagacagattgtgctaggcggcacaagcaagtatttgatcaacggccaccgggcacagcaacagactgttcagaacctgttccagagtgtccagctgaacatcaacaaccccaacttccttatcatgcaaggtcgcattacgaaagtcctgaacatgaaatcggtcgagatcttgtcgatgatcgaggaggcagccggcacacgaatgtttgaggatcgaagagaaaaggcaaacaggacaatgggaaagaaagaactgaagctgcgcgagatcgaagaactgctgaaggaagagattgaacctaagctcgagaaacttcggtcggagaagcgagccttcctcgactttcaacagacacagaatgacctcgagcgcttgacccgacttgttgttgcccatgactatgttcgtggtggcgagcggttgagagttgcaggccaagagtgcgaaaataaacttaacaaagcgcaagccctcgaggataacgcgatcaaactcaaaagtgaaattgctcatttagaggaggatgtgaaacgggtgcgcacagctcgcgacaaggaacttcgaaagggtggcaagttccaagggcttgaagatgaggtcaagaactactcacacgaattggtccgactgaccacggtctttgatctgaagaatgcaagcatggatgaagagaaagagaaacgacagactattcaaaatactgtcactgatcttgaaaaggtcttgaaggagaagcgcaagatctacgagaagctacaggcccagtacgataccgccaaagccgagttagacgcacaaaacgtcgaagtggagcaaaaggaggaactgcttcaaacattgcagactggcgtcgcttcaaaggagggccaagagagtggttaccaaggtcaactgcaagatgcccgtaatcgcgcaagcaatgccgccacagaacaagagcaaggaaagctcaaaatcaaccatcttgagaagcgaatcaaagaagaggagcctcgcgcaaagaaggcaaaggagcagaacctggggcttttgcgtgatctcgaaggcttgaaatcgcaggctaacaagctagagtccgagctgactcggcttgggtttgagcctgggaaggaggagcaaatataccaggagcaaaccgagcttcagcgggatattcgtgacctccgccagcgggctgatgggctcaagcgacaggcagcgaatatcgatttcaactacgcagaccctcaccccaactttgaccggtccaaggtcaagggcttggtcgctcaacttttcaccctcaataaagatcaagttccggctgcgactgctctggagatctgtgccggtggtcggctttacaatgtggtcgtggacagcgcggagaccggcactcagctgcttcagaaaggcaagctgcgaaagcgcgtgactattattccccttaacaagatttctgccttcaaggcatccgcggaaaagattggagctgctcaagaccttgcccctggaaaggttgacctcgctctgtccttggttggatacgatgaggaagtcctggcggcgatgaactatgtctttggcaacacccttatctgccaggatgctgagacagctaagaaagtaacatttgatccgtccgttcggatgaagagtgtcacgctggaaggcgatgtgtatgatccgtccggaacactttccggtggaagctcccccaattctagcggtgttctcgtgactttgcaaaagcttaatgagatcaccaaggagctacggagcaaagaacgacagcttgcgactttggaagatcacatgaagagggaaaagaagaagcttgattccgttcgctctatcaaacaaaatctggatctcaagaaccacgagattaagcttaccgaggagcaaattaacagcaactcttcgtcttcagtatgtgtttctcctaatctattcccgcaatttacaattaacctgaagtagatcatccaagccgttgaagagatgagagcaaacattgaacaactcaagaaagacatcgccgacgctaagtctcgccaggccgtcgcatccaaggatatcaagcaaattgagaaagacatgagtgaattcagcaacaacaaagatagcaagttagaggaactgcagacgacactcgataaactcaagaagagctttatcaaaaattctggctcggtcaaggagctgcagaaggaattgcagacttccagattagactccgaacaagttggaagcgacttatccgcagctgaggagcaattggttgagtcagacaacaccctcagtgcccaactagaagagattgaaacacaaaaacgagagcaagcacggctgaaggtatgtcatgccctcccaatactgcttaataatcatataactgacaattctaggatgcccatgacatcgcgcaggctcagcttgatgacgagagggccaagctgaccggctttgacgaggaattgcgagaattagaatcagccatgaaaagcaaatcctcccaaatcaccgaggacggactagaggcgcagaagctcggccatcagctcgagaagctgcaaaaggatcagcacactgctagccaagccgtggctcatatggaacaggaacatgagtggattgcggacgagaaagaacatttcggacgcgccaacactccctacgatttccagaaccagaacattgccgagtgcaaggctaccctacgcaacttgacagagcgatctcaaggcatgaaaaagaaaatcaacccgaaggtcatgaacatgattgacagcgtcgaaaagaaggagggtgctctgaagaacatgatgaagacagtcatccgtgacaagcgaaagatcgaggagaccatcatgaacctgaacgaatacaaaaaggaagctctctacaagacgtgggtcaaggtgaatggcgactttggacagatcttcaacgagctcttaccgggtagttttgccaaactcgaccctcccgaaggcaaagacatcacagacggtctcgaggtgaaggtgtccctgggcaaagtctggaaacagagtctgacagaactgagtggtggccaacgttcactcattgctctttcgttgatcatggcgcttttgcaattcaagcccgcgccaatgtacattctagatgaggtcgacgccgcgctagatctgtcacatacgcaaaacatcggtcgactgatcaagacccgtttcaagggatctcaattcatcgttgtctccttgaaggatggcatgttccaaaacgccaaccggattttccggacgcgcttcagcgaaggtaccagtattgttcaggcgttgacccctgcggatttgaaataagcgtgcatatgatcttggttgtctatagtttctttcttggtgtccccggtggagtgggatgattatgtcccggccttggtgtttggttgtctttggatgggaatggactctctcttatgaattatgtgtaaagactatatcaatttgttcataaatataaaatcctgcacaatatgcacaatatcagtgtcagcgtcgaagactggaaacttccaaactcggaaactccgatacccggcacgtgctcgattctcgacctgacccgtgccaccttccaacgcgcatggcgatttcattgaaatcacccccattgcgccaatacctatgtgtctcacctgaacatcacctatattagaccatatccaactcagcgtcttgcctttttcaaacccgttacggccagatatcaacactggggaccttggacacctcactcaacttgcgctctgccaaaacaaaatgacggacgaggagccttcgctgaacataccgtcgcttctcactctagcggttgtatcatattttgttctccgatggttttttaaccgcgatgaaagctccgcggggggaagccgaggtagggggcgtggcaatgtcgtcgatccggcgcaggtggaacagatcgcgcagatgttccctcaactgaacactcgtgatataatgtgggatctgcagcgtaatggcggcagtgtcgccgcaacgacagagagagtcctgactggacgggggctggaaacggtacgtgttgcgctgatgctgtcatcgatttccccaccttatctgcgtctcagacaactcgactcggccacaggcttcaaatatcaactgcaaatagtcagttatcgaagcattgactaattcactttcttagcctcctccttcgttccaacctccggtcgcaattccccccaccaatatcccgctggcgcagaccgccacgcccgtacagaaagcggacgcacaggacttgatatctcggtataatttgagtgcaaaggccgagagccctgctacagagtcagaacccgaaaagccttccaagtcctcttggtcccaaaataaggaagagcgccagcggatactgcaaaagcgtcgggatgatatgatcttggcggcgcgaagaaagatgatgcaaaagagccagggcaatgtatgatatgagaactgtcatgcttgcctgccgacaacgtgactttctgtacactgcttttgacgacgataaacctggccgaacccggcaccagtgtttcccgggggccaatataccctctccatcctttcggttttgtttcgcgacatcagtcctctttgtattaaagcgttcgcatgctccatggtgttagtcaaattggaatagtttcgattataaccgttggtcattgtatacggagggtatactggattatatacatgaaagtcgttttgggcattggtctgcgtcaggtatgcaccgaataactccgaatgaaagataccgccaaaaaagggaaaaaagcaacagcctgggatgattagaactccatgtaatcttcttcatcttcgtcccgggtgtcatcgtaggcaccatttgctctctgctcggccatctgttcacgccgagcctgttccttggaggacccaattctcctatgagccaattagcaacgaagtcccccaaatgttcggctatgcaagtatccgaaaatgggatcacataccgaagaccgtccaccacaccagtaacaaacccccgctcctctcccaactccatagaaccgacacccgtcagagcaacaccaccaccacctgtcgccgcagcatccagcacatcaacacccgacctcattttcgccatgcgcacctcacgcaggtccttcagcagtctccgtatctgatccgggtccacgagatcatcgctcgcggcgtcaagcagcatattcccaacctcaacccagtgatatggtagcgaagggggattccgtgaagatgccacggtctgggctgtgttttggggtaagaaaggcggcgctgcatagtaccgattaccatctggtgtatattgcggccgagcagatggcagtgcatcgcggtccagaacacttggttgaccaggcaggggaggaggcggggagaaagcgtttttgtagtcttggtgttgggactctacttcgaggatgagagctaatggctctgggtgtagccatgttggtgggataatgtttgcgcgacgttgacgcttgaggaggatggcgagccagagggggagggatgcgcgtcggggcggtacgagaggttcaatggggccctggggatggttagatttgagtatttcaagatagagcagttcggaggcgcatactcctagtagttcgaggccttctaggcgctggcgaggcacaattgttactgtttccatctccgccaggaaggcgatttctgacgccgtgacgccccggggaagaggaaaagccattgggcgtgtgaataggaaagcgaaggcaatttcaattaatcacgagagtcgcgatctcatctctcttaggatgatctaggtcgtcttgatcgtgcgctcgaccttgaccgtttgctctgcgtttctttcctttcgctttttttcttcctcttattagaccgtttctctgcttttaaaatgctcaattgacttttattgaatgcttctttcaagtcgcgtcgagatggcgacttcgaaacgttcaaaacgtttgaaacgtttgcatcggatgagctccacaagctccgactgggacccggtggccgaagaactgcagatcgtctggcaactttacctgcttgctgcaagtgattatttgcacagcatggccaatcctctagaatcagacctcagccggagtgctcgatggttcgttccgtttggcttggtcttgattcttttgtgggtgattcttgtcaataagactgtccccgaagcctacctcgacgaagtcttccacgtcccgcaagcacaagcatactggtcgcataagtggatgcaatgggatccaaagctgacaacaccaccgggtctatatctgttctcatatgccctcttcgctattgtgttgctgctgcgcggagagccgacagagctcactccacaggtcttgcgctcgacgaacgttggtgcgacaaccgttattttcccctggagactccagaagttgcttgatacgctacagagaacgacaaatactcggccattgggagcgaacgtgtctcataccgtgctgaatatctgcttgtttcccccgctgttcttcttctctggtctgtactacacagatgttcttgctttggtggttgtcgtggaggcatacaattgggacttgaagagagactttgagagaaaccaggaaagcgaatctggaaacgacgcgacaaaagcgactcgcagtggtattcaggagacactgggattcctggctttcgcgctggctgcattggtcttccgacagaccaatatcttctgggtctcggtattcctaggtggacttcaggtagtccgcaagattagaaagtctactacgccatgcatgtcatccgatgtgtcaactatcgtgaaacaaggcctgcagaatgaggtgtatgatcctctcgtttcggaggcttccttcgaaggtgagttgatctattggatatacaatatgacgcaagcaggagaccattctaactaaatctatagattacctgaagaccgccgtttcacttgcgactgtcagtctgaagcagcctttttctctcctggtttcggtcattcctcacatcatcgtcctcgcggcctttggtgcatttgtagtttggaataacggagtcgtcctaggtaagggtgacttgttttgtcacatcaagtgcgattttactgacagttactattcactaggccacaaggaattccatgccgcgggtatccacctggctcagatgctctacatctggccgtacttcatcttcttctcatggcctcttttcgtcattcctctgatcaatattctcgccctcaaaccactccccaaatacttgaacctcggtctcccgccgaaacagaggaaatatcccaagctcaaggctgccctgattgtgatcccgtttatgcttgccgtggtccacttcaacaccattgtgcaccccttcacccttgctgataaccgacactatgtgttctacgtattccgcattcttatgcttcacccagcaatcaagtatgctgcagtgccagtgtatttcctctgcggatgggtcgtgatctcagcctttggatttaccaccatccaacgtccgcccaaaaccttgcgagttcataaagctgctccagatgcgcccccagctccgactccggccccggctccagccccggccccagtggcacaagagcccaaatctactcagtcttctgcgcgcaagcctttactggcgcaccaacagccaccaaagggaacgaagaagcctaacaggtctaattacaagaaaatcaagaaggatgacccagaaaccaagaagactgacttgactgagctaccagcgaagattacggatccaaatgatcccgcggttctggctagagtccagcaacacatcttcacgcgccagagagaattactggaggcaccacgcgttagctttgtccttgtttggctggccgctacctccttgtctctcatcacggcaccccttgtcgaaccccgctacttgatcatcccgtgggttatgtggcgtgtgcaccttcctcctacgccatgtctgttcagggatcgagatatccgcccccgcacagaggaagctaaacgtcgctctgacctcattgtcaacggaccgaagttcgtggagacggtttggttcttgatcattaatttgatcactgggtatctcttcctgtacaagggctttgagtggccgcaggagcctggcaagatccagcgcttcatgtggtgatatctctgtatctttttcttttgatattagttttggcctgccttggtctggtcgcttgtacaatagaaatctaaatttgctagtttactcttctgaaagccattgagttttgttgtgatattatcttggtgtatccaaagcgagcttcattgtgttcggtgatacctacatgtcccgcattccaatcaactatctaccaaaaatagacactcttccattccatcgtatcgtcaattatgtctactgctggctcttccacgcggtatatttgcggtaaatatcatggcggaaggtttgctttagctcggccaccaactctccatcgaccggcagtgctgcctggatggcaccgacaccacagagattattcttccgatcaatgaaccaagtgagagtcaaaccaccaccccaagtcaacgttcgctcgccataccagccgtcaacatcctcaagcgtcagcaaaccgccaaggccatagccaaccttcagctccgaatctgttccaacgcggaaaaagggcccaagaggactagcaagcgcagcttgatggcttgccgccgcctcggggccaaggtgttgctgaaacatattgtcgacgacagcaggcgtgagcaacttgccatcattagccagcagcgagtgcagaaccttaacaaaatccgagccaggtaagaacagtccatgaccgccaaaggcaccacggccccgcaggttcatctcgccgccaccgccgagcacggcactaccaacagccccagggtcactgggattgagatcgacgagacgggctcgcaggtcctcacgggtagcgggatagaactgagcatatttgataccgagcgggtcgaagatacgcttctgcatgaagtctatcagcgagccgcccgtgacacgctccaccacgcggccagcccagtcaagaccggggccgtacatccagccggcaccgggctggaagctgagcgggtaagtgaacatctcctcgacgaggagagggtcgtcattctcgggattcccaaactgcgcgcgccacttggcgatgggtgggttcaggaagtggtaggaggtgccggagctgtgcgtaagcagcatcttgagggtgatagggcgggctggtgggtcgagctgagggcttccatcgtcggcaaagccagtgagaacttgctttgcagcgagctccggggcgatggatgacaggtcgccgtctagacttagtaggccgtcttcgacgcactgtagggcagcgatggttgtgatcaatttcgtggctgaggctaggtacagcacatcgtcgagctgctgtggctgcttctggcctgagagtagagtgcgctctccgatcgccttgttgtagacaaagtggccttcggcatcagtggcacagataacagcgccgttgatcttgccggcgtcgatggcggattggatactagcttccatattttttggtgaagatgatattgatacacagggtctatcaagttagcaggagggcttaaataactatgtagaatacctacaacacaggtatcagttcggcgtctatttttggatgctcgggctctcttttgagactaagtcaaaaggttattgtagtactccgtacaatatacatcacatttcaggccgttcccaccgcctatattctacctataacaccaataaggtggggaaagacatctcaacagaatgtctgatctgagaacatctaagagcacaagcaaaaacacaaccaagatatacaagtgtacggagtactccgtatatgtgtgagaactgtgaaatagcgcccaggcactacagatcaaatatgttaggcggtctgattctgccggtcgaccaagctgttcaccgatcaggaaggcggtaccattatgcagaaaagtggggttatattgaactgtaaggatgtcctttcgcccttcggggcatacggtgaaaagaaaatatacagagaagattagcatggcccctgcactaaggatgacacgctcaatcaaagagaagtaacccattttttttctcttttacacgagctcaattgatgagatagagtgcaggctctttgtatacattattctactactccgtatatatttgcagatactacgcatactacgcatagaagtcacgtgttaatcgccgttcgactctgcacgttgtcggaaatggtggttttatttaagctctaccaggttcacctgttaactcctacccccaaatatgagtacgctaataggtgttcctgccctatccaagttttgtttatacattcattctcattccattgtttgtcatataatctgaaatccaggtaggggccaaagtggtgcactcttccgccagaataggctgtgaaaaaggtgtaaaatgtgtaaattgaatttgtctctgcgatacaccaatagtatcgttgatccgacgatcatcagaagaatataaggagccaggtttatattagtacaagagttcaaagtatagagaatgatttggagtatagaaagcaagctatggagaacatgtatcactgggtatactccgtactggggtctgttttagaataaggttgttttatgtgggtccgctaaaaggatcgaaccagggtcccagggccacgggataaccttcgaaagagatttatatgaaccgtgttaagatattcttttgagacggtatatgaacttattcagttattcagtctagaatatacttcctgcatccgttgaatgtcatcgaaattgtttcgttctcatatttccaaaacttcataacggactagtcattaacatgcaaaacccaacagcaactctatttttttggcgcacacgaaacggaagattccacgggtatttgtgtccacctagtcttcatccatcgactcccagccatcaccaccacggggctcaccctcatcaccctccccctccgaatcatcagactcgtcatcatcagcattgataccaaccgtgcgctccgggacatcaccagcaaggtcaggcatgcgagacacaaaagcacgccgaacagcgccgttagtcgaagcatcccagatctgcacattacccttgctaccagcaaccgccaaccggaagctgacctcctggtcgggcgcgaaggtagtagagaacaccttgccgacctcaagcttgcgcgtgacaaccaaagtgggcttgtcattctcgacgctccacagcttgacggtcttgtctgttgagccggtcaccaaaaagccggggatagagctgttgatgtcgaaggatgaaacggaggagtcgtgtgcttgcagagaccagacaggcttggactcggcaggggtggcggggacattgcgcatgtcgtagcggtagaccatgccgccgtcggtggtcacgtagaagaagttggtgtcatgcgggtcccagcgcacacactcgacgtctgcgtcgacgccccagcgcgcctgggcgtccggcgcacgcatgtctgctgccactacggtgcggtcgtaactgccgcttagcagaatggtggactcggctgggtgccagtctagtgagcataccttgtccttgtggttggagtaggacttggcgcaggtggcggtgttgagatcccagagcttgacggtcttatcggctgatgccgaggcaagcaggttgcggtgctgacggttggcagccagcgccaggacggcatcgatgtggtactcgtcgttggccttggccttcttcttttgcttcttcttcggcttctcggcgtcctggccaccctgcccaagaatcgcgttggggtacatgcagtccactacatccagatcccagatctcgatatcgggctccatggttccaatagccacgaagtttccttgcgtccgaccttctgggttcttgccaacaggaatatcaagccactctgtgcaaagtgggataccgggaagcatgatgtcgtggtgcacatagaggttgtccgctttgtcttcgtagacgtagacttccaagtgcgcaacttcgtcctccacctttccggccaacagaaggttgtcgtagggcataatctggagctcctcgcgttcttcatcatcctcgtcttcggggatcacgaggtacgggtcttcctcgttgggctggtggtaggccagggattggacattgccgaacatggtgatcttctcgccatcttcatcaatctcctccttgtcgtagttatccatgtcgaattccttcaacacatcatcatcactgttaaatccgattagcatgagttgaatctgcgctgcgctcaacatcactcacgtctttgaatcggtgtccttggccgaggtcttctcctcagcatcctcctccatagcatcatcgccttcatcttcagaaccatcctgggcagcattcatatcatccttcgcatcctcgagctgcatgcgcgcaagcttagatatacggctcatctcggcctcgtcaatctcatatttggtagggaactgggcggcgacaccacgccgcacccatgtcgtagttgtaatcatggaagacattatgaaaatgttgtgacgaaactgatcacacccgtccactttttttctatcggcgatatttttttttatcgtgcctgaggggctgtccgcccggcagaatccggccgatctccttaccgcccggacgttttgcgatgttcttgctttgcgttgatcatacgattgaacttgaactatctttcagttttcagagaccagtgccattgaaatcatgcattctcatctccatacctcttacaatgccagtacgtcgagtccaccatgcccggaagatccatctcgccatcccatcccgctttccatattgactgatatcacacagattgcgaagagatcatgactgctctagatgagtgtcacgccaagggattcctacacaaagtcatcgggagctgcaacgatattaaggtcgacgtgaacaaatgtctctccgctgagcgatacgagcgtgcaaagcgcaaccgagaggaggcgcgcaacaaccgccggcgtatggaggagatctgggccaaagagcgcgagcttgatcaagagcaaggagggcctgcgcttgcggctgctagggcggctactgcggcggcggcggctaatgctagtgctagtgctgcgaagcaataggctgtgtcgtggatgagcatatgctatcatatatgccgtcatgtttgggactggagtttggggtctgctttcaatggctgttcttcgatttggctcagacttgaaagacagcactgctgcttgttattagtagccttcggcatggccccgatttcaatatgttcacgtgagaacattgaatgcacgggataagcagaccgaggccaaattatctccttttatttcatctggggaagaatactttgtacgatatctgaacgttgaaatgtacatatagccgagtgaccttcgctctgtcttctttgccatatttcatctggcaccaatgtccaacacttaatctacagtttgttggggttataggatctcttgaatgatatcagatgtacattactattatgcacatcagctgaacttttagatataacccatccgatctgaacgccgcaccccagaagtgaaataaggttgagaatgcatgcaatgataaccagcatcatgaatcgcctatgccgtaaagattcaatcaagcgtcaacctccgtagcctcattaggctcggtggcctcctcgaagtcttcacggggaccactcttagcatgacgacgtttcctcttgggcttagccgctgcagtatcatcgccatcatgttgctccgttgcatctgcgatatcaacctccttccgagcaggcttatccttcttcggtgcaggcgcatcagtcttcttcttagccttcttcacactgagaggattaggcgccttgaccctaggaccgcgcttcttcttaggttcctcctcatcagcactctcgccatcagcctcgccatccctcttgcgcttgcccagcatgggatccgcatccaatccagcgcggaacttcccacgctcaacaccatcccgcaccatctcagaagcgctgctcatcggctcgaggaccataaccgagcgcttaacgtatatgataggcacacctggaatagagcgagcaccggcgcgtaatgcgcgggagcggcgcatagcctcctcttctttacgatcctcttccgtcttccgtctgcggggctggttctcgctattggtcgtctttctcaagattggatccgcacatgcgagaatgtagtgctccttgttcttctttgagtctgcgttgggtgaaagcagcgagaggagacactcgacttcgtcgatgggcgtggagtccgcgttgtgcgagcagtggcggagcgggagttctgtgggcggaggaaggaagagaggtcggtatggcttttcggttttggggttgatgggttgtgcggccatgatagcggcgagtgagcactttgttaatactgtcgagatggttagctgggatgtgtcttggtggatgggaactttgtctggtgagactcacgaggcttgaccttgccttggatcgttctttcaagtgcagggattagttccatcctgaaggagtcggtggcgcgaaggaaattcgagtcaactgtttgagcgcaagtcagtactgtacaccagaacaatatattgaatgggacatacccaggacctgataggcctctcggaaaccgaaagtgagctcatactggtgcataagcttgcgatacttctttgaacgtttggccctcattgtgaatgatgggtatcaagtatttgaagattgaatgcagcaaaagacatgagcttctgcgtcgaccgaaacttttttcattctgccgggcgggagcggcggtgatgtggtctgtgctggtggtgaggtacccaatactttgtgaagtggggcgtctagccttgagattgagtaccctgtacttagcatttactgatcgctacagacttgaatagttatgaaagaatgtattgagtcaaggaaatattattatttgtcttgtttagacttaagtagctatcaacgatggacagactagccacatcgcgctaagtaatggagtccctcatgggtgtaaatcgaaggaaatgggtctcaaaagtggtagaggggttgttataggaatcaccagcttgaccggttggcatcatggctttggtgcaaaccgccaatgcacaatgtgcgcttgttagaaagttgcccgagccgatggaagataccaacaggtggggacatgatgaccaggcaaagctaagcaatcaagcttcgcgctggagaactcgagtaacccagctggcatggaagccatttcccgtggtttgatggggtgagtatttcactgcaatgcatgtccgggtcctgattcgacgcttgcaaggcatcatagctgcgcaagagcgatgtagttgggacaagcttttggcggtagatatgtgaatctagatgatagacggggaacaagagcttgcctcgtgtgtcgaggttcgtcaatggcaattggcgcacgtccgaggcaaggagatcaagacgcgaaattcaagatggatatttgtgaaagtctgatcgtaaaaccaatgggtgcatctcatccatcccgtttcttgcaagatgcaaccacaacagagatatcgtccattttccctccttgaatagccagaccctcatccactgccttctccatgtagggactctccgcaaagggatcctgggcaatcgtgagagcagcattgagcagttccctagcaacatagacattgcggctatcagacagatgagggtgctgcgcaacattcgttggcgccgcgcgctcttcctcccatttgtcaatactgtccataacgatcttcaggacctcatgctcccataggttatccatgacgccatccgagaaggccaggacgatgtcgtcttcctgtacctcaattttggacaagactgcatctttccggggtgtgtcgatactgtttgttccaagctgcatggggcaatcgaaccaatgccactgctcggctgtgcggaaaatgacctttttctcgctcggtcggatcacgaggattttgcaatcgcccaggtttgtaacgtacagcaatggcttctgtgtgccgtcttcgccctcggtccagtgtattatggcagtcaccgaggttgtcgtgccgagccactcggtaggagatgtggttgcccgcaaggtctcctcgaatgcatactgcaggtatccgaccgggtcgatggcaggcgtgctgtggtcgacattcctttcgacctcgagggcccagaagtgtaataggagtctagaccagagtctgtatcggggaagagaaaagtcagcgatcgtggcatatgataaaaattgaaattgagaccactcacgcagcatgaccacgaggtttcgtagcccaggcgcctacgccatcgttgacacctatgaaattctctgcgacgatgatggcatcgtctccgttgttcaggccacggattagctcgccctggacggataatctcttatcctggcttagcccgtgtgtcgtcaaaggatccgagaaggatgaagagggtggggagaggaaaggtggagggaagggtcgtgaaggtcgtttggcacatagagcgtagccagtctcgaatcgaaaaggcgatttgggagaaccgactggctggtcgggagtgggagtggtgacgccgtaggagggccacactgccgccgcgtgatatggccgtgctgtgctcggttgtcggaggcgggcactctggactgtggcttgatttatgcttatgttcacgatccacttgctaatggacgtccatgatgatgatagtgagtgtgacacggccgctgccttggtcaccatccctaacttggctctttgtgcaccaagatgggctcggcgaaggggttctggggcattaaggcatgaaaggtgcaaaatgaagagacggagtacaagagaacagtagaaaagaagttttgactcggacctgggcttgagggagagaaaagaaaagtgcgactcaccggtaaaggccgagggtgtctcgaagatatcactggtctgcgccgccgactgtgccttacactacgtagtatctctgagaatatgaaaatcttagaaatcgcgagtttttagggttttattcttcttcttacttcattctttcattctttttctcattctttctcttatttccgttacatttgtccagaatctatctttttttcagagcagttgaaccccgccactcttagggctacatccacttatctatatccctgccgatccaatgatccgctcagaacttgtcagaacctgtctatatatatccctgattcgccctattgacacatatgttgcagaagagaatcgagagcaatctcatagttcacatgctatcagccaaatcagagcaactacatcatgacctcaaagtgaaccacaaaagcacacatagcgaggaatccgatgctaacccagagagcccaataattctggataggaacagactaatgatcatcggccactttcgcgggtggcttcaagcagcaaatctataaatgtcttttggtcttcatccaattgcgtcatacttaaccactactactatatgataggcggcggcgaagcctgagcttccgagggaccctgtcatgtcacattctctctgcttcattggtctctttacttattctatcatacaggtactcaccaagaagtctttctctccttattcttatactaaccttagaagccttctgcgaaagaatcatgggattctcgaataggagtatgacttggcacttcgcgggcgaaacggatgtctgtctacaatacgggttaaacacagaatatctcttccggttccgagccatggacttatttcttgcagagcatgccctacttgaagtaacgcagtgtgaggaaacgttacaccatagggttatagccttacagaaggctacagctatcgagtctaatagggcccagcttgaagaagcaaataaacagctcgaagaggctcaagcgcaatacctagaaaaagaatacgccctctatcacgcagagtatgcccttgatatgcacgctaaagatgcttatgatagcttaaggcgtgatgctaaatggtttatgcgcgaagaaatggttcaggattgttcggatcgaggcggctgttgtagccgggaatgtggatgctgtgaacagagattatctttctgaaaggaagaaaggtagaggccattgcactgtagagtgcgggtgctgtatcggcttacgaggattcgagctttcaaagaaagacaaagaagaaaggagcaaggacttgaaaactagtcttgaaggattgtattcggcctatgctttacatttggcaaattgctatttttgcccattaaggaaaccctggtctaccgaacagatcctcatcatatgcttcatgtttacttcctcgcttattggcttacttgctgttatcttgtttacttgaatagattgtttgttagatagctacgcgagaagctttgaggattgcaacatttgcaaagtaatcaactggctgcttccaactttacagcttgcttcttctttctctccatcttagtgattctatattgaaagcgctcttctatctttgcaagacctggcacgtcacaggtgcagtgagaaatagttatgatgatacctataccttgctttagaatcatttgctaaaataatagactctttttattgtaatctatacctactcactatgatacactcggctgcatagatgtgttcgtacttacacttgaaagaaaccatcgccggtatgatctctggttcttcatctgcagaacctcaagaatgtcagcaaggcccatccatctatcacaccgcgataaccattgacggcctgattggtatttccagagacggcaaacctgctcttaacgcagatatggtccagtctgtcgacccatctacacaggatggcatcgcagttgtcaaatagcgggagtgtccgccaaggcgcctttattcgtagaggcgctctaccagtgcgggttgaacgctatcgatggcagccatagtattctcgccccggctatgtccacctggtacctctctgtagacattagagcagaaaccaaggaaatcaggaatcaaaattccattaatgataccaaacgaaaatacaaaaactaacgagtccttgggaaaccatggttatataattaagagacaagaaacaccaaggccaaaccaggccaaaccaatagtatgcaggtacattataagcagggggtgacggcctgcgggaggagaaggatgagcagatccaccatttcggccggttccggggtaggcggttggaagaaaacaaaacagaacataatcttttctgaaatatcctcttgctagtgccgtggccgaggtattggaagacgtaggcagcatacagaaccaccccgaccacgacaccacatccttctctcaacgcctaatcactgcccttgtctttgagggcgtggaagatgtcgggaatggttccgacatctccgggctgaggagccgggcggcatttctgcggtggcacggcaaactccactgactcagagtctgcgttttgcactaggggaagatcgtcactggcgcagttgtcgtacgggacgataagacggggaggggtaggcttcttctcttccgcttcctgctcgcccgcgtccacctcgcctgtcgcgggggactgggccgtgcctggctgaagagagagggccgttcgggctagagacaggcacttttagtgagtatatgtctctcttccaaggcctacacctcccacgggtactttcaaattaccccaccaacgactttagccccagctcctcatccttctgttcgaagtaattccgttggtagttctcgagggccctctggccatggaacctacagacataaccttcagcacgacaggcatagcaagagagaacgaatgagacatcacataccgcaccaccaatatcaaacccaaaaccacaaaagcgaggccaatgaggctaatgaggggagctttccacggttgtgggtatctctccgggcatcggcattggttggcattcgactccattttgatatgatagatgatgtgacttacaggcctatagttcacggggggtattcctatatgcccataagcaggtgtgctcagaggcaggtacatctgggggcaagcacacccggtccttcagatcaaagtgagtatcgcttggtttgatctcaccctcgcctacgggcgactatgtgtgccaccggtacacttctaaggttgcatgttctagatacaattgcttcaacttgcctatcatattcaaaatctataaattaattaacaaaactccactagtgtatgcttcaactggtacattttctatctaaagaccaacaggtagtacaaaaaaaaaaaaactaaaagtcagagaccctaaaaaagacatcagaaaagccatatatggaatctgttaatcatactgtcgagtcgtaaacaattgaaccgtaggtaagcctgataaatagaggaggctctagatcccgaccaatcaaaatgcaattatctccagggttggccgaccttattttgacctcatctccacagaagtacggtttgtctaacttcggctgcatcttaaccggcctggcaccaatcgtcgagctgactggaagctggagagagcttcaaaataccacaagttaccggcgaagattatttcctcgtcaatactaagctattattattaaggcaggggattagtgaagcggggtaatccaaaatctatcacttattatgggtccctagcctcgtgctctattgttgatgaagttaaaccgtcggatatgggataggtgagtctgtacataacatggaatagcatctgggggttaatcaagattcattttgaaactggatatgtagacttctcgtggtcacttcatcaaataaatgacatggttcatgatcagtttcatatctgtcaaatgatattatttccccttggcttccccttgcttccctccgattgtttcttaacaatcccccggtgggattgactaaccgttccttctttcctcctttccgttatgactttgaaacgcggatgaagagaacccatttctctgggaatcctcgcttgtagtccatcagctgagctgaaatgtgaatcgtaaatcgtagtcgtagctgtcgtaatcataagtcgtggttaaagtgacaggactgcaatcttagaagctttcctgggagcctcccctggaagtcatctcgcgttcccttgcaatcaacagagaaaacagttcaaaagcatggttcaatacattggcgatatcagcagccttgacatcacgtttgagctcagccaaaccttcgaagaacatgcgagcagtggtagaagcagtagcagggaaagcaggagctggtagattccgtctgtatgcaagaccacgcttggtcgccatgatgcgtacatgtcgttctgcacaaggacagtcgcggcgattcttgtcggtacactcccaggaacatccacagatagagttgcaaatgcactttcgtcgcctggcaaggttgtaaagtctagggatagactccgtcctgcgcaattctccgatggttgttcccagacctttagcagtatccgacaagcggttatctttcacaacatccgtgtcccagacagtcgttggcacatcctccaaggggatccatggcagctcctcgaatggaacgtcgtcaggcggaatactcactggagtcatagtgagatacttctccgacattactgccatggtctctgctgggataaggtcaaagaatgggataagtcctttccatttctgacagtaggctccctgtctgtaggagacagtcctcattgcaaatgggcggtatccgagggggtcaaagaaagggacctcattctggctcttctttttcataatctggttgatgtatccttgttggaagtaggcgatgatgtctgtccgaaggattgcgcagatctctggagagtctagtacttccttgaacgctaggacgatgcggtagagatgatcagcctctggcataaggaatggcatctcaacccgcaatgcactagtgtcgactgggtaggaaccgcagagctcaatgcaggccagctcaattgttatgcgcgcatatagggcatagtaaaggttttcgacagtgtcaactagcacagcaatcttctgggagcgaatgttttgctcgctgcgtctgatccagtatggcagaccggtctggtagttgtccggctaagagtggaaactcggcgttagctgttatatttccaagaaaaaaggcgtaaaagtatgggacaagagtaaagttgtaagctcaaaatatacctcggcgccgtaatacaagaggataatctccatcatcttcgacattgtatacaacttgccgaaaatgcgcacgatgacaccgagatgaatcgattcctcaacaggatccatgttttcggggaccacgagcttggttggggttgtgggcgagggcactgatgggaccatgacccaatcgtcactgctgacggtgtagaggcgaaggcggcgctggccgctagatgcgagctatcataagtcagggtcaaatctctcaaaagtgaaaccaatgcatgacgtcaagtcagttaccaatgtctcagagaatcctgatctgtcaacaagcgagccaaattcgaagggtgttcttccctcagatatagtggctgaagttgaggagatcattgaaggcatggtcaagctgctgggagcttcggccttccgggggtgatcggtaccgtctgagactatggacaatgcttcctccacaattgactggcagtacttgtagaaacgtcccttcatccgttcaatctcctcatgtggaggggcctctccatctttgacgcgggcacaagcctcttccataatggccttggtggcctgggcatacgcatcaatacagttcttaccccgttggataaacaaatccaagtcctttcctgacttcagagcattcaggcgagccatggaaatggtagaagccattgctagaggatcaagattggcattgtccgccatggggacagttgggagaggagtgggtgggaacatgaattcagaataaacaggggcatcgtccgacacagggcgctggaaacgaggataaacaagctgtttgtcctgggcaagcgcacggggagtctcttgctcacgtgtagcttgagttgcagactgcgaagactgcgaagactgtgaggtctttcgtagtttgccgagagcagctccccatataccaggtttgtggttgttaaccatgttgaatttctggtgtttttgtttttcaatcacagaatctttgcagtgtgggattgtgggagaaggaagaaaggaaagggcaggtacgtgggtatttatacttgcccagatcatcagtacaattgtccactcgctcgatcacatatggcgaacggtccatatcaggcaggcgcgactcacaacggcaaacgccgcaacacatttaaccttaaatgggcaggaccaactgcgcgcttcgaagcctgacgaaacattgtgcatataatgcaagtattcatagatgtaaataggacatgatttcgtaaacgcgttcttcgaacactggaagcgtctggagaacctattcgagtgttggccaaccttataagccaaccttataactgaaagcacctaggtagatccatggatgtgtgatgtttgcccaatatatcggcaagccaaagccaacacctttccaagtcaggtccgtatgagactatcatcaacgaagtgaagcaaggataccggacatcatcacctggtgcttgtggggcctcatcttcatcccgagcttagctttggcctctttttcggggcttgtctcggttccacgtacctgtaaggctgatgtttccccagccgggtgcttcagaggctgaaaatctggagatcgacgcagttcaatacaacatgctatatacaaccaccctaccagcttatcagaaccggagactgtcttctaagagggcaacatgaacatccacctgtgtacgttccagatcgcctaggagcaaatgtgctgctaggtagcatgggaacaaggaaaaagtatataaacaataacaataaacttgaattggctcatacaaacaaagaaactcaaggctctaaccctgcactcggaacgtacgaccactagcagtcttgcgctcacgttcttcattctctggccgggctcggttgagcactgttgcgagttagcagtgaacatgctttctttgctcagacgatacataccctggaggaaatccgctgtccgcttcctcattcgagtgtggatgtaggcctgcaaaatgtttagtgatcaatccctcaacaagaccgagagaaactgcatacctttgaggctttgatgtggtagtggaaataatcacggaaggtctggatgtgagagatgttttcataacgacgctgcggggtcaggtgtcgagggaaaagaactgcaagccgagtcagtaataaaatggagattgatagcgcaatatgcatccataccgaaggtgacatagctaacttcgcctccagtagcattcagaccaggaacgtttgcaagctcaagaggagggtcgttacggaacaggacctggggggcgttctggagtgtcaagacacgtcgccgggcgtcgacgaattcctatgggctgtcagtcaggggttctcataaatggaccacttgtggcaaagtacgaacctgcaggaagaccttgccaaagatccggtctgtctcctcgcggaatacggtgctgaagatcactgtgactcggtcccagttggccttgatatagatggcctcctcttcacggtagtgaatagccataacttcaccgccctcctggataccctgtggtgctgactctgaggtgtacctggaagcctcctcggcgagcttgttgaattcgtcgaatgctttctcaaagggagcagccattgcattccgtttcaggagggcaaggttcataatcaggtcatttcgggcctcctcctctgcgggcaggttttcaagatcgatttgtaccgagaaatcatagccaggctccggagatacaatataaggaccgtattctctctccaacacctcctgagctccatactggaccagttccttgtagcatttcacattgatcgagatgagaatcttggtcttagactcgggggtagaaaggtgaaatgtcacaccgtcgaagtcggaaaccacttggtcaatggaggttgggggtgctctgagttcggcatgttagctgggtgcctgcttcggggttgtgtatacaatgcgcaggatcgcatgccgagggggaggaataaaacatacccagaaaagcgctccgtaaggagtgactggatcaaagcattctggtaatctaagagaagcatgacgggcaggacaatggatggtattcagtgcagataggtggctgttgtgaggtcgaccgtgatcgtcatgggcggtgggggagccggagaggtcgctgtcgccgcccgtattaattttgtcctatcgatagcaatcggagattccaaaaattttcccatccaccctcaacgatggtgaaatcatacttgtacgtacgattttaagtgatttggaatcctctgatctaagcgctaacccttacacagtaagttcgagcattcgaacacattcgggctcatcgcctcggcgtcttcgaatgcggtttgggccaaagatgaccagattggcattgcacgccagacgggcgccggacgagcaattgtcggcgcaggtgaggaagttctatgttgggatgtgaagaagggagaactccttggaagatggcgcgattctgcctgcagagcgcaggttagtgtgatcactcagagcatgacagatgaagatatcttcgcggttgggtgagtgtcctctggtgtgacctagtcggatgattctctctaactattatgtcccttctcagctacgaggatggaagtattcgtctttgggattcgcgcaccgctacggtcattatttctttcaacggtcacaaatccgccgtcaccaagttggccttcgacaacgccggtgtgcgcctcgccagtggttcgaaagataccgatatcatcctctgggacttgatcactgagactggtcttttcagacttcgcggtcacaccgatcagatcacatcactacacttcttgttcccctccccagaattgctcactgcttccggattgaatgaacactctggattcctattgaccaccggaaaggacgcattgatcaaagtatgggatcttgcctctcagcactgcattgaaacacatgtggcacaatcgaatggcgaatgctggagcttgggtctttctcctgaccaaggcggatgtatcacagctggtaatgatggtgaacttagggtctggtcgattgacgaggcggctatgatggagatctccaaggagaagctgggcgcggatggtcgccgaattctcacagaacgaggaactttctaccgacatggcaaagaccgcacaattggcatccgattccacccccgctcagactacgttgcattccatggttccgacaagtcagttgaggtttggcgcattcgctctcagtcggaggtacagaagagtatggcccggaagaagaagagaagaaaggagaaggaggctcgcaccgaggagaacgcaccggaagaggataacgataagcccgaggatgtttccgccgctcctgtatcagaagtctttgtccaacatgttatcgtgcgaactggtggaaaggttcgttcctttgactggatgaccaacaagtcaagtggcttgaaccttcttgccgcaacaaccaacaaccagcttgaagcctacaacattgttccagcgaacaagaagaacaccgacagcgaggatccggactacactcggagcttggcagtggacattcctggtcaccgaacagatatccggtcaattgcattgagctccgatgaccgaatgcttgcctctgcttcaaacggcactctcaagatttggaatgttcgcaccgaaagctgtctacgaacacttgagtgtggatattccctgtgttctgcattccttcctggtgataagattgtcgttgttggtaacaagaacggagaactcgaggtatttgatatcgcatcctcaacattgctggatactatcaaagcccacgacggacccgtgtggtcacttcacgtgcatccagatggcaagtctatggtcagtggaagcgcagacaagacagccaagttttggaacttccaggtcgtccaggaggagatcccgggaaccaaacgtaccactccccgcctcaagctggcacacacaaggacgctgaaggtcaacgacgatatcctcaacattcgtttctctccggatgcacgacttctagcagtttctctcttagacaacaccgtgaaggtcttcttcgtcgactccctgaagcttttcctcaacctttacggacacaagcttcctgttttgagcatggatatttctcatgacagcaaactaattgtcacttgctcggctgataaaaccgttcgactctggggtttggactttggtgactgtcacaaggccttcttggcccacgaagacagtatcatggcagtggcattcgttcctcacaacaaggatggaaacggtcacaacttcttcagtgcaagcaaggaccgcatcatcaaatactgggacggtgacaagttcgagcaaatccagcgcctcgttggtcaccacggtgagatctgggcacttgccatgagtcgcactggtgatttcattgtcagtgccagtcacgacaagagcatccgcatctggcagcaaacagatgagccgctgttcctggaggaagagcgtgagaaggaaatggaagaggcttacgacagcacactcaccgcatccctcgagcaggaggacggcgaggacggcgagaaggcggaggccgtcgatgctggcaaacagacgaccggcactctcatggccggagaaaaaatcatggaagctctagaactaggcctcgaggatcttgaagtcgtacgcgactggcgcaaagtcaaggctgccaaccccaacgccgccgcgcccgatcgtaacccagtttacctggctctcaacaacgtctccgccgagcagcacgttctgaacaccgtccagaagatccccgcagctgcgctccaggacgctctcttggttctaccattctccaaactccccgctctcttcaccttcctcaacatctgggctgatcgcgaatggaacgtgcctctcacctgccgcgtgttgttcttcatcctgaagacccaccaccgtcagattgttgccagcaagatgatgcgccctatgctcgacagcattcgggtgtcgctgcgtcgggtccttgcccggcagaaggacgagatgggcttcaacctttccgcattgcagttcatcggcaaccagatccgagagcagagtgtcacggactatattgatgaggatacctgggaggagcagcaagcttccaagggcacgggcaagaagcgccaatttgtcagcgttgcttgagtttaggattaggtttgtgtacaagcatgtctactggcgttgtgatcattttcgacctcattatcttggaggttttctctatgttggtttccatataaaagttttatatccttgggagttgaagagaatataaggaatgtatgataattcaatttcgaagtgaaatataaccttttctctgggataattgtccactgaaatttcatagacccaagtgtatcaaagtaatagaatgattcattcaattggtctagctattatattcccctacgtgcaacaatccaagcaatccataataccggaaacgaatataaaatctgaattgcgagaaacatcgttagcgatttactccaagcaatgatctgtccaagaccacaaagaaacaacaagcatcaaagactctactcaggagaaccaatgtaagcatcgacgacagggatttcagcccctgtcatacctcttccggctcttcctattaaaattccggttctaatgcgaatctcatcatgatagagtctgtttggtgcgatgtttcccttgtagtcctgtcaggggagtttagtaccacatacctattagtgggttcttccagcttagaccgaaggtcaatctcatttattgatcttggcccacgctggactttggtgttggttggagctagagaaggggaaagagtttcgtcgggagttttgtgagaaaatttggcccggtggagctttcttagtcattctggtcacgtgttgcttttgtatggggctctactctacctctatgtactagtggatacggaatctgtataaagatttggataatgttcaatattaaatcattattcatttatataccggcatttatttcataacggtcatgattccatgtacaacacatgtggtggtgaaaaatctcgaggtatgatcaagaggacggcttcatagtcccacagcaagaacatgtccaccattgggtctccataaagctactgcacgagatgcaaacccatccaagaggcttcttatctgcaccccggtccaaagatttgagggtatccagtgcacgggttcggttcttgaaaacaaatgtatccccgggattcgctttcgcctcttcctttcgaccaagagataaacgccttttcttcaagtttcgtgactctgaacgcactggctgggtataatggcgaccagaggcggacgtggatggcgtgttggtcggaggtggtcgttctgctgcacaggcgtcacaacataagaaggtggacgggttctccagcgtgcatgttgggcagatccagggtgtctcgtatgagctgttatcggctgtgagatcaacagcttcattgcgatctgatgatggggcttcttttggaattacaggcaaatcttcggagacagcaggtggaatgtcggaagaagcaggtggcggtgacgattttgtccgaggtcctgccgggtgttcttgacttggcgtaacatatgacgactcatatttctccctttcttcttcctgtatcagttcaatgaaggcctccatgatggcccgctcgtttgcgtcatcttcctcagcctgggttctgaacccatgcgaggcctcttccgcaagttcggtgcttcggtctgtaccagaagcacagccctgggtcacttcaatacgccgctgggcagcgtcagcccggagttttcgcatatctgttcctcggagcacgcgcgtgccgcctagcttcttgccagaatttttggcaagaatccttcgctgttcagcagcggcacgagcttgacgtcgagcttcatccagcggaattctttgaccacccagacgctttccttgagataaaaagccctctccagtgtagccttttcgggctagttcctcatgctcatcgcgaagttgattccacagcgcatgaaactgctggttgtgaggaccgaccacgttgtggcagagtctaagattgattagattttgtatttttaggagatttagatttcaaatcactcactcatgaagcatggtatccaaaatctgttcaaaggggagaaattgccgttggtccgagggataccgcaatcttagacaaatcttctggcccgcgttgacgttcagacccagcaggtttcgctgccgcggataaaattcacagagcgtggccactctccaggcgcgctgtcgcatgatcggtttgaccaacgatgcgactttgcgcaggatcaagagagcttcggcttctcgggggaggttcttttcatggcggtattctgatattagagggtctagctcccgcattttcgagatttttgatcaagaccttgcacaatatggtaaacagtacactgctggtaggttactgtcttcgttgggatggcctcctccgaggccaggatctgggcaagaagatttcatcagagcatgacctatatggcggtgtaggcagctaggaacagtcagaagaacatagccagtgatggaaattccagaatgaaaccaagtttggaacatccatggatgccctgcataacgtctggattcaccccccgggatattacgggggggagttnnnnnnnnnnnnnnnnnnnnnnnnnnnnnnnnnnnnnnnnnnnnnnnnnnnnnnnnnnnnnnnnnnnnnnnnnnnnnnnnnnnnnnnnnnnnnnnnnnnnnnnnnnnnnnnnnnnnnnnnnnnnnnnnnntgagatagcggggggtgaatttgatcacgtgacatggatatacatcagatggtgttttctcagtcatatactagtagtagacacaatcctgaatttaggaagtgcactatatctaggtaaaatttgagctggaggatacttggaatgtcattcctatcatttttgtagtctcttgtttgcagttggggccatctcgtatacagatatatattcacagtatgtcaaattgatacgatagctaagttctaaaaacccaacattccgatacatttcactatttccaagcaagaaaaaaataaaaatcagggagaaaaagtcataagaccttgagtagtcctgtatacttccggcggcttccccccctccaccgttttttannnnnnnnnnnnnnnnnnnnnnnnnnnnnnnnnnnnnnnnnnnnnnnnnnnnnnnnnnnnnnnnnnnnnnnnnnnnnnnnnnnnnnnnnnnnnnnnnnnnnnnnnnnnnnnnnnnnnnnnnnnnnnnnnnnnnnnnnnnnnnnnnnnnnnnnnnnnnnnnnnnnnnnnnnnnnnnnnnnnnnnnnnnnnnnnnnnnnnnnnnnnnnnnnnnnnnnnnnnnnnnnnnnnnnnnnnnnnnnnnnnnnnnnnnnnnnnnnnnnnnnnnnnnnnnnnnnnnnnnnnnnnnnnnnnnnnnnnnnnnnnnntcccgccgtcgactgttttatacaacccgctgctcatgtgacctttccgataacaccgcgagtgttatcagcatccatcttatcgaactttcgctcttctttttcattccaacttgttctcagataaacaagatgacgagcgacgacaagttcttttttgactacgtgagtatcatagaagaagacaaagaatgcttccggcgctgatacttccttacccagctctcgtctatctccaatgacgtaaggcggtattctctcgacgtcgcagactcgatcgaccgccaagtcgactatgccgcgcacgcgatcaaagatacggtggcccagcagtcatggataccagccactattcgtccgggtcgtgctcccccaagagtgcgatcgcaaggcatgacggaccgagtggaaagctggatgactcggaatcgcgcatggacggcggctatcctcgcatttatcgggaccggcgttgtcttatactatggaaacaaaaagttgcacggaaaacggagaaaggctaggagggcggccagcggcgcgaggaaagagattgttggtatgtgttgcctacattcgatctgcattaggatccgagtgctaattctgcgattatagtggttgccggatcgccgcacgaaccgatgacaagggctattgccatggatttggaacgtcgaggatatattgtatatgtgactgtgtcttccgcggatgaagagcatatcgtcaagtctgagaaccgtgtggacatcaaggctctctggttggaccttacaactgtaagtgctgtttgtgtatccttcattcgcgataaataaactaacattgtaactagacatcctcctcgccggccgaaatccatccttcgttgcaagagattcgctccttgatcagtcagccacagtcacccatcgccggagtgcccccgcacacctgccaactgagtggccttatcgtggtcccatcgaccaactatagtgcaggccctgtcgcaaccatcccgccgtcatcgtgggctgacacggtcaacacccgtctgctctcgcctattctcacagtgcaggcattcctccccttgctgaccctccgcagcaatagcagcactattgtctttgcctacccctccatatcatcctcgctttccgcgccgtttgccggacctgaagtcgccacaacccgagcaatctcaggcttcgcggcctcgcttcgtcaggaactccgtctcctcgaacaaggcaatgtggatgtcgtcgagctgcagctgggcaatattgacctaggacctacataccgacatggccagagtcagatagcaggcacagaagtccttgcgtggaatacccagcagcgagccctctatgcctcacagtatctgtccagcgttgagcaacgcccagttgcctctgctggtcccagcaccatacgcggatcaccggcgcggaaactccatcacgctattttggatgctttggagcccacctcgcgggatatcttcggccgtaaagtgaccaagaaatctgtcatgtatgtgggccggggagctcggtcatacggcctgattggggcctgggttcccagtggactcgtggcgctgatgatggggtaccgcagtgggaatgggattaaccccgagagcccgagtggcagcggcagtgaaaccagctgggagagagtctagacccgtgtacacatctcgcttcattggcactcccatctttaatatatcaaaagcacttgctttgaataatgcttttctatacataatatcatcggaaatactcttcgctcttaatgattctattatccctaccacatatcgacatatagcattaaacgccatagaaatttattagattagttgctacctagttggatatcattcatatgatgcagcgccatcctcactcctatcagaagaagaaaatcgacctgtcaaatccctctaaaccggcacaaccttcctctcattggacgactcaccaaaacacgcatcgctaaaagcctcgtgtgcgcacagcgggtcccgtgtcgcccgcttaatcccaccgcgcgtcaaacgacgacgcaaatgaatcagcgcccaggaaatgacgaagaaaaccaggaccgcagccaagacgccgaaacagtatcccgtcacaagattgctcttctgcccgtggtcaccgacgtcgaggaaggagtatgggtaccagccttcggtttcgtgcgtgatgtatgcgacgcagaggtagagcaggagtatgaggagtaggaacgggatcgcgatgaaggggtgcggcgctgtggctgggaggatgatttccagtagggcgtagacggagttgaggacgtgttgggagatctggagatgtgggttagctaatgtgccttgtattcgattctttttttgctttgtctccacatctgcggagtagaagagtgttgcggggttggggtggggttggattgtgatatgagctctgttcatgtggcgggggatatgttggaatggaagtatagaggcaaaatcgaaagatatacgtacattttgccagcgggtgaatggctccttgtaccacggcgggctgaagaggatagcccaaaagacaaccgtaacgagaatcgggaaggttgtgactgtcacatacaatagactgtgtagcacgcggaagacccgcggccagcggtcgaggagaaccgaatgacccgttcgtacatagtaggctgtatggatggcggcgaatagcatgtagaagccagtgccccagtaagtcagccaagtgaagtagctgaaggagtgaccaatcgaggcggggtcatcgtgggtgccataccagccccagaagatgaagatggaggcgaaaatgtacagcgagatcagaccgcgaagaccagcgaggacggcggggggtaagatccaagatgtctcgaagtggtgtttgacatcggtagtccggtcaactccgaagagagttgccaatgagcgtcgaggcatgttgttgcgcgtcttgcgatttcgttgtgccctgggaggattgaggctaaagaagtaaacaaggaaaagcaagattcagctgtacatgtaggtaggcactgttgagattggaactggggtaattaatgcttgctttttcccgcgatacagggcgacctcgcaagccgttttgcgctttaaggcgtccgttcacgaggactagagccagtcgtgcaggtactatgctcccggtctcacctctgtccccacaagcgctggccatacatagcgaaatgaccttgaaggcttgtgattgaatccaacattgaatcagaatcaggggtgagtcttataatggatgaagacatccgagactttgtctctcggaaatatagcattaggttagatacagcagtactttatgctatactactgcttatagtctcatgctaggtacagactgaagtatagtaaaacaaagtctacgtctagtcaggtctacaggccaaatatatgcgaaacaaattggtatattcacgcagtaagatcctaagtcgtgaaaataatatttctttcactcacactaggatcaagcgggtgccgcacaatggatctgaagtctagctctagcggagcattctgaacagttcctgaggtaataacgccatcaaatggcttcagcgacatttgaatgcagagggaagcggctgcgtgtctatccagccaatctgctctgaatcagatggccagacatcagaaaaaacctcgaagaacatgtctcgacgacttcttggaacttgttcaccagccgcgatctgggtcataatgaagaccctctagttgtctcccttgaacatccgtctcctgcaagataaacacaaactctctagaagttgaattacccgcttggcatcgataatttgtggattccaggaaagtcgtcctgaatgagagcttcgattgtctcagatctgaaatagaacatccgctcttagggcggctatctcatgatatttgagattgagttgaccgaaagatgtgaggcccgcgcgtgaacctaacctagcctgaagctaaaggtttagtatcttataagaaaatgatgtgtgacgtgacatagtctgaggtatagttggcggctatctcatgatatttgagattgatgtgaccgaaagataggaggatcgcgcgtgaatcagccaccagcctgaagctaaagggttagtatcttataaggagataactagtgtgtgatatgacatactctgagacatagttagcggctatctcataatatttgagattgagccaaccaagatatgggaggcccgcgcgtgaatccaacccagcctgaagctaaatgtttagtatcttgtaaggagatagtgtatgatgtacatactctgaagttggggacctccggtagaagttaatccatttgttcgttacttgaattcatcaaatcttttgtgtgatggtgtgtgcgacgatgtaagcgattggaaacatccagggagagagagtccaaataaatacatctatagttgttcagtttgtcgtttgcttacaatatcttactagctctgtattgggtggtatgtgtatctaatcatcacgggtttcaatacggtaggtgcttccaggcttctatagagctgatcttatgcagtcttgcttaaggttgttatcagctctattctgtgcaatagacggtatcactaggcaataattatacagttatgtatttttcaaaatgatgtctcatattatttacttacctgtaatatccataattaactggcgcagtggttaatgagccaaagtctgatagagatcctatacgctttatcgactattcggagacaaagtagaaaaacaaataagccaagtaaatctatagcaaaattatttaagaactagaagaagagaagcaaggagggcctatttgtcacttctcccatgcctcggccatgatccatcaaggttggcacttcgtatacaaggtttaggccacccgtggacccgggggtgttgctgagtaacctgcaacattatgcctaattggggatagtgcaaaccacggaccatggttgagttaactcgcagaggccgcgtatataatttctatggcgacatctgaggttgtaatatagcaattgcactatcaaaatagaaaagaagccattatacaacggccggaggaggaatcccttgaggttatatatccccatcccattcggaaccatttgaaacccttttagtagtgtggtacccgctctcgtggcttgcaatctaagtaggggatggtctcacttctctcaaccattggtaaagctcgcccgtcttgatttttatatatgactaggcaccagtttcttccatgtcataatcgagagcaggcatcactcatgtgaggtggtttcttcagatcagcatatgatgaaaccacccgtgtggggagagacggcagagcaactaggattctagaagatagcgggtcaacaaagcactcagtcctagggagtaggagaataattagggaaatcaatagtaggcttccaagagtatatgctctaatagaagaatccatagccaataacaatacataatatgcgtctgaatgttattcttggcgaccctcccccctgaataagtgtcccccctgagacgatcccttgtcaaacgtcgagacacagtggagtgcgactgttttattttagtgcacggggcgcgtctatttactacttgtcatcctaccctcccaaggtttggcaattgtgatcgtccgcccttcatttttctcctttctcctttctcccctctctatacctctcccccaatgccctgatctttcatttggcttcgattctgtctgtagggctgtcattcctttggctctattctatcgcctcccccgcccgaaccccctttgtgtgttatccgcaaccccgacctttcttcagacactcttctagactacttcgatgcttccggcgcaaatctcgaatccaaccgaatcgggatacatgattcactagccgactattagatattcatatacccatcatggatatgcgaggaaaactgggcgaatatcgctccaactcccacgataataccctgcggagtggctccccacgggtggcgcattttgacggcgaagttcctcccgcactttcccccctcgacgcattcgccgctcagagtcgatttctcgcccgacaactcgatgagtctcgacggggagaccgccgtatgagtcggctgccaccggcgagtgtagctcgatcgctttcgcaaggccggccgggcttctaccgctccaagtcgtcggttgatccccgcacccgcaccgaactgacccggaaacctacgcagaagggactcccagagtatgaagagcccaagcaccgccctatatccgaacatcctcgattcagctccatctccaatgctaccaccgaggctagcttttacgaggataatgataatgtgacgccgcggacagcgacgcctaatattagtggggaagcgcatgaaataccgcgcaccgagtcaccagaggatttcacgtcacgtccgagtggagcggagggtgcgcctgttgttgtggcggttgcggatccgcaaggttcatcgatcgactcatcaacttcgcgactgcacatcccacgtaccttggcaccaccggtgtcaccgcggacgcgtccatccagcagtgccaaggttacacaccatgagagttctgatgatgaatacagcagctccaatggtgggtcgacgttctccaaacctcgcaagctgtccgatggaagtgctgtgtcattgccgtattctcccatgtcgacattccctgcacgaccacaccctcgatcgccgtccttgagctcggaaacatcaggaacgggaacgaaccacctaccccgcccttcttttaatttctctcgaccgctgagtcgatcaagtacgaccttgtctgctcctggatcttcgacgcctactgaaccgatccttgcctcggaatcgaaccatatgacccgtcgcggcaagccgactccgcttctcttgcagctctcgaccgaagatgctgctgcagtggaagccatggacggcgagccgtcgtccgccatgtcgtcttatatgtacaccaagtatgcgcttccgcgcggacgcttcctttcacgggattccgtggtctttgcaggcttgcaaacacctcatttcgagtgggaagagcccatatttgagaaaacgcctccccggcattcggaggagccaatacgtttggcacggacgccatcccctacgcccccccgccaattagagcactcgcccaagcctcactcgatgcacgaagtcccagcttccaagcctcaatctccacctcaatccccgcctcactctcagcgccagccccaacctcaacttcaacctcagactctcaagtctcggcctgttcccgactcaccagtggagccggtattacggccctctgctgagagcacccgaccaacgaacaatgacagggatgaaactgtctcttctgcggattcggctagcacagtgcgaccccaagcccccaccgcccaggtctcggcttccggccttacagccgacgagcacgtggccaagggtattgaatgccacgagcgaggatctctgagtgagtcgacgtatcatctgcggattgccgcgaagcaggaccatccgacgggaatgctgctttatgcgctagcctgtcgacacggctggggcatgcgatccaatgagaaggagggggtacgatggttacgcaaagctgtggattctgtcggattggatatgttggccgatccggacgctcccggtgcatccaaggcgaaggaattgcaaaaggctaaccgggttcaatttgctctgagcatatatgaactaggcgtcagctacttgaatggttggggtatcaagcaggacaaggcttatgctctgcgctgcttcgagatcgctggtcaatggggtgacgttgatgctatggccgaagctggattctgctacgcggagggtgttggctgtaaaaaggatatgaagaaggcggcacgcttttaccgccaggctgagtccaagggtatgagcatggttggaaacagctggtacgttcttcctgatatttacatcccgatcgacgtcattaacaagtataaaggatctacaaggacaaatacaacgaggagtccaatggacgcgcccccagtggacgctcccgtggccgaaatgccagcggagagaaggacaataagccacgcagcaagtcccgcactcgcagtatcttccaacgcaagaagtccaacatatcagaggcatagactgtcttttgttctattcacattccttttatctcgacgcgttctggagttatcgaagtaccatccattttgcattttgcattatgtttggagcgttctgagctgatctttgatttttttgctttttatagtcgattcttcgacttacattccttcactttctcatgttcaaacttttccttttcttttcacatttgcattttcatcctttcttagccgcctgggcagctgttatcgagcatggaccgagtctggtccacatgtctcgcaggcttaatacttcacttctccgtgtataccctttttcgtttcctcccatcatttgccatttttgtctctctattttcatggcaccttctcttaccaattctcttcttggtcatatttcttgggtatgaccccctggacaattttgtttgtcatatttgttctcttattttgctgaatgcctcagtgtggcgactcatgaactcatgacagaatcaagacagcgttgatctgtatcttttggacttcctaggagcatttacttgatcttctccaatttttcagtatataaagcaagtaacagggtctcagcacctgaccccccgcattgttccccggcttttgtctcggagcattgactcaaaagtgtctagatcggcctcttctccgggctttgacaccctaaaacacactggcgtccttggggttatgtttagcgcggattattgtggattagcgggggttctgactggactagatcggcttttctctccgtctaaacctgtgaatacggggggcacactccttgcatccagggtcgcctcccttggcagcacgctatgttgctgctagtgtcgccgtccaccaatgagggtcttgctcattcaataatctagtgtaacggtactctagatgagtatttctgaaaagtcttaatctcccacgacacttaggaaacgccccggtaggacagagcacgcgtcctggaattgctcttggtattttagtccacctcggctcttgtctttcatgtggtgatgattagacactcgtaacctgatcctaaacatcttgatcgcgtcttcccggaaatctggagttccccgctaaagtgccacctgaacttctcttctcctctccatatacaattggagaaattacaaaacagggcaaaataaaagaaaaccagaagaagactctatcttactgacatgcatcatatttcccctttctttttcgaattgcatttggtggctttttccaggtctataacatgtgacgctagaatataccctgttagttcttcattttaggtctcagtcttttattataaagtacggaatactacccacgctctttcaggggtgcttgtatcactctcattggttttcattcttttttccccctcgcttcgaagctcttctctctttttataggtgtttgttcgactcgactcggtttgtacatgtcttgcgtagactcttacagttacaatccctaatacaaaaatcacagtaacaagatgtcgactacaaagccctcgttcgtcgagcaggaagccagcgtaaccccgacgccaacgaagaagagcttcggcgcgcgcctcgccgcccatttcaagaaatggtggtgggtgcacctgattatattcatcgcttgtttcctgattatcctactaccggtgtaagtccactcttcctgacattcttaaccggcatgacggcccggacaagaaacatcccactcacatactactgcaccgtctagcgtctacgtcgcctaccccaagatcgcacaagacgccgtcaacgactcgaccctcgccatcacagagatgatcctcagcgacccaacacccgactccttctacctggagcagagacaagtcctcggctcgaaaagctcctaccatccccagatctacgctttcaattcgtcggtctcgctggccggtgcggcggctccgtttgcttatgttactgtccccgctgtgcagtcgaaggacggagcggaaatccacttcgagcagagggttgatctgacggataccgatgcgttcgcggattatactactgccgttatgttgaatgaggaggtttcgttgaatatctatggaaggccggggttgaagcagggtggtttgcccaagacgacggttgattataacaagactgttgttatgaagggtatgttattgttcctggtttcgtgaatctaggagaagaagagaagagtatggttactaactcgatgaaacaggtttgaacaaactcaagggcttcaatgtggccgagttcttcatcatgttcccaccagtgaacggatacgggatgaacggcaccgtgatcatccccaatgcctcggtcatgaccattccaatggtaattactcctctttccatgcatcacattctacgacactaacccaaagtagggcaacgtaaccctagacctccagctagatggaaaatcagtgggaacaacctacctaaacaacctcgtcctcaaaccaggcaacaacagcgtacccatgctcggcaaggtcgaccaaggcgccatcataaccctgctcacatcaaagtcgaatccctacaaagacggcatcctgcccttcgacatcaccggaaatgagacatcgtataacggcaaggacctgccgtacttcaccaaggcgctggctgcgaatactctgtcgattaagttggatgttctgagtgcgctgaaggcggcgggcattaatcttacgctgtgatgtatactatttctgttaatgctcatggtttatgtcctacgttctactttctatattgcactaccgtgaccgttaacagattcggtggttggtctgtgctgtttggaggtttgttcacgtttgtgtatatttaataccctttttttgttatcagtatctgggttgttacttaataagatgtccagagtgagggatatagtgcttgaaattttttggatcacccgacgactcatcaaggattagccgacgtaaattgactgactgttctttcagtaacgaaatatcccgctctagcttgttcagtataaaaagacccatcgtatttccaattctcgacttcgagtaatcaagggtgtctctgtgaaacagaatgaagtaatctagtagccaacaaaagaataagaatgaccaggaagaaaagaaacggaagccgcatgactctccagtcaccctggtctcctatcagttgacatgtgcggttgtctgattagtcggaaatagaacatatcctacaaaccagcctgcagaaactgctagatatctgtcccccatcccctcgagggattttgggacactgcacgtgatagagtttgcatgaaggctccgtttgggtaatgggaagctgagattttctgcaaccccggaaatgggataattataaccacttctgtggttcagcggtcatcaagagagggacggcgttgcccatactgcgggctattatcctgtgtacaatcccgaaaggaattgtggaggtaaacctactatttgaaatgcaatagacaagaaaaatagtgctcagcttgcccaattcaatggaattcctagcaagacagccaactagaatagccatgaaaacttgaatgttaaagttgcagaaagtccaatcctctgatagatctcagaaactagactttccaaatcttgaataaatcaggtgcacatatttattatgcttggctttcttgctaagtttccttttgcacgagctggtcactattatccttgtgttttgcttttcgaatggtagttttacctccaacctccctttcgggccagggctgtatcaggtatagcccgagggtatggtatagtgaagtgttgttcaaggtgggaggtcgacgactgttttcttttagaatcctgtattgtgctgtcggtcctctatcagttagcatccatctgtccaccggtgtagtttaattgatatagcttgccaaggtggtggcagtagtagatgattgtcatccttgaattccagcagggacagctcgctgtggcttcaagtggaagttgggaagccaggtttggaagtggaagttatcatggccaatgcaagagtgggaaagacaatgtgagagatgaagaagtaaaatccagagagatggtatttatatggcaagggcaggaaaccaggcaaccatgggattgtcttacatggggtttttcttccacgtgagcaacctgaaacagaggtaagtcaggggatatgtagttgtccgtggaaatataggtatttcatggcagcctgcatattcaagactgtctctcatagttctacctgaagacggtaagccgcagtactcgaatctgtttctcgacactatatacgagtgatctcgccggcgcgactgttctaacttctaatgctgcacagagcccctcttactggcttattggcttcacagcgacccctcggccagatcaactcccctgcttttgtcagaattcagccccttaggagaaacttggccacgtgattttacctggtcacatgatgtttcattaaaacgctatttttttcaccgctaggggagaattggccacgtgacacgcacgtatgtacgaccttgtgatttatagttgcttcgcttcgctccgcaactatacgccctggatgcagtaccagcatgggttaacctttggagacaagccacaggaggcatattatagtattgcatgtcagagcttgatagtgtctaaaatcattatctcttcatgaggcgtttcgtaagagacagttgacctttcaacaaagaattaaagaatatacacagagagtgagagcttcagattgtattactgggcaagaactagatagcttcaccactttcctatcaaaatatgggtggtataatccctaaagggaaaggaaaaccacataatattgtaagatactcgtataatgcaccctgatccgagactagtccagggtcaccatcttgattaagacaacgggcagctgccgaattatgccgactgactggtgtacctacctggagtcctcaagattgggtggtcgttgatgataaaaccgatggacatgatcaggggtcccacagatgggataagccctcacattataatatgaccactctcaccaccagttgaagcatatgctagatacccctgtattatgctaactgtgcattacattcctagtattgtatcattcctgataatctattccaacgcccttcacccacgaaagattgagctaacaagaacctcaacaaatgccaccacaaatttctgtccgtgctcctgaacctattgagacccccaggtaccccggccatttccaacaagaatccatacttcttgacaacaggaatatcacgtcattatcttcaaattacggtcgcactacttttgggtatgggtacaatcagcgcgattttgtatacgaaccgatatgaatgttcaatgaaactcgtgaattgatttgaggtatgagatcgaatctagttaaattgatcacttcactggactgtttcagagagtgcacctgcaagctgccgtagaccaacactgacatcgccgggctgaatgcagcactccaagagggctagtttccatggctccaaattgatccgatctaaggctgatagcagatcggcttgtgttttgatttgcatcgagaaaaatgccggattaagaccccggtctttgtccaattgagatgcgaacgggtcgttgcatgttcttgtatgcttgggtgtacacatggcggaagcgaatttggcatagttccaattggcgatgtaattatacggtccatcatgaattgcagactagaatatggcaaggaggatggaaaaatattagcaaaggagtcttgcttaattcaaagatggagaggaaaaaagagggaccttgaagcaggatatgtggccttagaatgaacagtaagaacttacctcgatctgataacccagattgttgaagatgaagactatcatgttggctctacttcggatggcagtacttagctcttgagcagtcatactaactactatcattgaaaggtgactcaaatctgaccctgcttgatcagcttttgaaaaacccaagcctacaccttattgggtgctgtaatgagttgaatgctggctacgctgcagatgggtacgcgcgaagttcccctaccaaagttgcggttgtgatagtcaccttcacggttgggagcctatcactgcttaatgcaattgcaggagcctattctgagcgacttaagatcataattatctcaggctgtccaagctcaaaattgctgacagaggggagtctcctccatcatacgacaggtggagcgagcaaggaccaagcactgcgtgtattccaagagttcacggctacctcaatccgtctggattccagtgaatatgctgcactccgcctagatgaagctctctctcagtgcattcataaatcactgccagtctacattgagattcccaccgatatagtgggggttgtgggcaatgcagcaactcctttgcagatttcaccgccaacattaattcaatcagaggccgtcgatgaaattatatccccactgattgccacctggaatgcagcgcaccggccgattttgatcattggtgctctggcacgcttcttcctctcgacagaagctctgatagcatttgctgaaaagctgggttgcgccgtcttctgccagccggatgccaaatcaacgctaccagagtcacaccctcagtttgtgggcacattttgggccattgcttccaagcccgaatgtagagatattgtgatggacgctgacctctgggtggtagttggaggccgttggtctgatttgcacacggtgggaggtctcaatatcaaagaggagcgccgacgtatgattaatatccaggaaacatctatacgaatgccgtatggtcgattgtttcaagatttatgcctagccaatgttcttggcgcttttctgcggtcctcaattctccccaaaagagaaacacttctttcatcccaatggaagtcgcgtgaacagaccagagtcaacagtcctgtacttggcgaagctctcacagtgcgtgggatcgtggatgttatccaacagctaattacaagcaaagacaccttgatagctgatacgggggatgcttggttcaatgccgccgatatttcgctccccatgggggcgaactttcaaattcagctagtttatgcgtctctgggatggagcctacctgctgcgcttggctgccaactagctcgccccgatgggcgaacaatcctcatgattggtgatggcgcttttcaaatggaatcttggcgcaagtacctgggacggcaaagaagtccttaactcccagctcttccattctatgggccaagagggtgccgatattatggtctttgggtgaaaagctcggggtgatcaatggtggcatcaagctcggtcggtcaaatagctcagtcatacccgcactttcaggcatcctcaaaactattcgacctttgatacttgctgaagagaagtttacgttccatggtcagcctggagcgcgtaaagaatttagtcaattaagatgagagtaaggcctcacttacctttctccatcatatcatagacttggggtaattgctcaagttccatgatctggcattgcatggcgaggtttttacgaaggaagaattccagtgcctcctcggtatcctctctggtgccaacataagatcccttgatagtgatcatgcggatgacgaccgagaagaggtcggcttttatgactgcccctggcggcaagccaactaacacaattgttccccgagatctgatgtactgcaaaattcagtttagctaaatcacttttccggacgacttattgcgtggatgctgttaggaaaaagaggggagttaatgtatcatctcacctcaacagcctgggagatgggacgatcatctgatgataccactaccacagcatgaggccctccgttggtaagcctctgaatatcacgggtgagatccttggagcttttatagtccgcaaaatagtccacgcccaatttctcacaatgcgttctcttctcagctccacttgatattgcaagtactcaaaaacccatcgccttcgcatattgacaagctagggtcccgagccccccaccagcaccagcaatggctaatatagcccatcagcagtgaacgtggatagttataacgaataaaatcacgacgaaatatacgaaatcataccaactatatcacccgcctgggcgccggtctcttgaagagcgcgatagacagttaccccagcgcaaagaatctatattcaggcgattagaaacacgccatatttgtttgagctggataatgaggtaaaagaaactagaccacttacgggagcaatcttgtctaaaggcgcttctggaggaattcgaacggcacagagttccttacagacgacgtattgctgaaaggtgccgtctctggtgtacccagaaaactgagcacttgcacacgacctctgatcattggaatcacaggatacacaagaaccacagatactgttgatccactttatgtcaagtgggctcatttagtatacttgaaagagtggaaaaataagcaacagggacaagcattcttctctcacctgtattccaacgtggtcacccacagctaaatcttcaactccctctcctgtcttaacaacaatccccacgccctcatgacctcctttagaatgtcagtatggcccttttgacacttaaaaactggataacgctgatcaagggcattgagagatcaggtgcttaccgataagacctttcttcggatcaagtggccagccccctttccacgcttgcaaatccgagtgacacactcccgagtatttgatattgacgagcacctcggtagcgccgggcacgggaacaggtacttgggtaaagtgcaatgctataaatattaaacaacgaacgtaagttggaagaatggggctttgaaaaggagtaaatttattacctgaaccactggtctcaaagacctgagcccattgcctctttggaatgtcagtcattcttcctgctttcaactcgaattatactgtatctgtcgaacggctagagaaacgaatattgagaatcgcaccaatttttgagtggaactgatggtataaggaaatggaatgttgtcattaaaataaaattggcttgagaagggccttcttataagttgagcaataagtatgaccatgaatcctgggatgcaaggtcgtgctatcactattggatcgaattgagtactccggtcttaccacccctcgtcctaccctcctccttgattattctgcattatataccaagactggaagtgattgtcttgatcgacaccgtttcagttcctttatttgtaatacaacttactcatttgcggcatttatgattcaactgtatacatgtgcaagatagaagtcttcaaaaacacctcattgaatgattcgttatcatcaagctagatgctatctctgagatcccaaagatgcacctgggcatcttacaatagaatttccgcagtaccaagtcagccaaaaggatcatactctacccttaatggtcttcttgaaaccgtttgatgttacaaagtaatatattagttggccgttctgctatctctatgggtttgcacatcttacctctctatcacaccaacgtgcgtgcctactttcggtaccacacgaatgcacatgtctagttccgagtttctggaggctgaccatctcctgcaatcgtccaacaacagcatagacaagagaattgaaccacacaatgatatcatttacacatctcaccttgccaccaaactaacgtgcgtgcctactttcggtaccacacgaatgcacgtgtcgagtctcgagtttctggaggcggaccatctcctgcataatgatatcaggtggtgtaatggctttcgtcgcacagatcattatcacggcttcacgttttgtctgccgatcaaatcaagatgcaagtcaatcatcaatcgtggatagctattagatgagtcatgtctattgaaagtaactccatattcacaagcgtaacatacaccaatgaggcttgaccgtacaccattataaaagtagcctagaatattccctcatatgtttggaaagtgaaccccatcatcccccctcgccgtatagactttacgttttgcatccagacttgaaggcggtatcagcacctttgcccagaatgtttcctcggtcactcaagcttctacgtgatgagagctccgtcaagtacaaacacgtacattgtacaactattacaaagaagactttgcatgaatcactcaaatcgccagttcaatcctcggggcttcatactgggatctcaaaaaccgtacacatagccaacttaccatcgaaaacgaccaaggttcttgaaatgaaacatcgagtggtgccagttcgtctttcggggtcttcgatatctaccaagtcaggtggacaactgaagtataccctcgatcgatctctgatgagtatgactggtggccagattgtgtgtgagatgcttcgaaggcaagaagttgattctatctgtaagttgatcctacgcaagggagaaggaatttgcttcctattttctatgcacatctcgatgatataggagctgactatatgaacaatgagcagttgggtatcccggcggggctattctgccagtctttgatgctctgcacagctgtcctcattttcgatttattcttccgcgacacgagcaaggggcaggccatatggcgcaaggatatgcccgcacatccaggaagccaggagttgttctgaccacttcggggccgggtgcgacgaacctcatcacgcctttacaagacgcgctaaaagatggcactccactggttgttctcaccggcgaagtcccaacctatgccatgggcacggatgcctttcaagaagcagatgtgattggcattacgggcccttgcacgaaatggaatacggtggtacgagacattcgggatcttgccacccagatcaatgatgcttttagaattgccatgagtggacgaccgggccctgttctagtggcactacccaaagacgtgaccagtgcggttcttgaaacccccgctagagtggcttcatcccaatgtctccctaaattgaataaccccgttttacgatttgatgctctcaaagccaaccgatcggcgagcatcaaaagaagcgcagatcttatcaacaaagccgagagacctgttctttacgcaggtaatggagtgctttcgtgtgccgagggcccgaaagtgttggcacaattagctgaaactgcctgcattccagttgccactagtcttcttggtattggatgttttgatgagaacgatccaaagtcacttcagatgctaggaatgcatggtactgcatatgcaaataaggcgatccaagcagctgatttggtgatcgctttgggcgcacgctttgatgatcgtgccatcggcgaccccgatctttttgctcctgttgcaagagcggccggtaaagaccaacgaggcggcatcatacacttcgaaatccacccccctcatatcaacaaaatcattcaatgcaatgaattcgtccaaggagatgttaccgccggtctcactgagttacttcatcatgtccagaaggtggagagcagaccggagtggatgggccagatttctaaatggaagaagacattcccgatcaagccgacgcctccgaagcaaatgacacaaatatctcctgagtgtgttattaggcttctaagcgatcttactgaaaaattgagcaaacaaaccataattaccactggtgttgggtcccatcagatgtgggcggctcagtttttccgatggactgcgaatcgctcgctgatcacttctggaggtgcaggaaccatgggcttcgggcttcctgcagccattggcgcccaagtcgcacggcctgacgcaatggtcattgatattgatggggatgcatcgctgagcatgtcgatgcaggagatggccgtggccgcggagtttgggattaacatcaaaatcttggtactcaacaataatgagcaagctatggtcacacagtggcaggctcttgattatgacaagcgatactcccacgcacatcaacgaaatccagactttgtgaaggtggctgatggaatgggcatcaaagctcagcgattggatgctgtgtctgacatcacagataaacttgagtggcttattcgctcggaggggccagccttgctggaggtgaaggtggaggaaaaggtccccgtgcttccatgggttactcccggcaaggcattggatgagatgatcatcaatgccagccagattgacactagtaggaaataggttgaagatcattttgcgatagttcttgctgcgcgatttcttttcaaagcaatgaatagcataattttatttgatgtcgtatatcggagacatttaggctgatctttgccttattcatcggactatgtaaagcagatttgctgcacagacgagccgagccgaacggcacgaagtaaaatactacgtcggagatttggccggaagggagctaagaccgagatagaatctagaatcatcgacggagcacactcggctcacatacgaagcctttgtatggggccggaattggcaatgaaatgcagctcagattagtctcgcgcatatgtaaaatacgttgcgcaacattttaatatgccgttggagtagaaacctgcatatttaaaggcaagtatggtgtggacgaattagtacgacatctactattccatatatccttgtctaaaacagccttcattggtccagtaccagaggccttgccgtcgcagggaggtaatattagctcgatataatggttggtctcccacaaaacttgcatcctcaaaatcattggtagctggtatgggggtatgtataaggatgtgaaatacttcagcagtcggacctcggaccacaaaagtctccgaccacacccacgttttttttttgcgaataattacattttggaaccgtattttttcctacgctgatcccctctgactcatagccaggtgagacctctggcaaggtttcaatggttggtaacggccagaccgtagcgtcgcttgggtccactcccaccaccaaggccagggcaaaccacaccctctcgctaagtggtgcagctgtcgtcccgtctgccgtttagtgtacaacggccacggcccagagacctcggagcgtctcacctatctccggggtcaggttttcggtcaggtccagctaggtcttttaagattgcttagtacttagctaaatccacatttcagtatactatcgactaagaacctctttgctcaagataagaactaaattcggatcggctgcccctctagtctatctgaaaatgattgtgctttggttattcaaataattcaaaacgatcccctcatcctctataaagaaattcgcgaataaagtggccctccgccccaattccgtattgttgatatgccctaccttgctttccggagtacagttcgtcagcgaacacgcgccagtagtcataacccaaattttcatcgaatggtttgaataggtttggcaattccattaagtcgacgcttttctgaggtacacagtaaaccaggtacgttgagattttgtcgacacaatcatgatcttattgattgattctgttgactaaaggctcatctcgagaaagctcagatgctagtcgtttgacgcgtatcatttttgtgttaatcgagatgtagccaccaaaaatcaaaaggtgccactctccagtgctgcgaagaaccctttgtagagaccaaggtctggaatcacattgaaacaagacgtgagaattgggcagtctggtaccaacagccaatttttccagctagctcaatcttgctataggggtagttcaatttgacgtacttccctttcagatgttctcatttcaacagtcactcgaacaggatactctcacccctcgcatatagtcaaatcgactggatgtgagttccactttcgatactgtccgcatgcccacgctgagttctgcatggcaattttatcaatgatcattgcctttattcccgtttgtgccatccatgtaccggccatgagcctaaggtggatagtcagtggggttttgtttcatgaacgacgaacatatcctgcaggaccagcgccgacaatgagaacatcggtgctcagtgagttatgtgtcatattgagattggacttgaaattcaccaagtcaggttgacttgggtactgcaatcgtgttccaagtaactaggggtttccaaggttccatgataggatgccgaagtggccatgtgatccatggatagttagttaactataaaagcactcccggggcataaatagcaacgcagacacctttccacgtttcgtctcagtagtcaccccatggtgttatcctgtctagcatcctactactcctagtgaaaactctgctctcacacccgtttcgcaggcagggctcccgtggcagggtcccctcttcaatatgttgtattattctacgtacagcagccgggttatagtagctacataggtcacgtaggcggtacgcccacctgagggtaacaggaatatggcagttatgatacaatgtaccgatttcttaaagctattagaaaaagttccgtctttagaaagggctatttttcgttcaatgtggaattaaaggctagatcaaaagcgatcaaagctgacacatcaagtgacacagcaagataaatttccttgccaacctataaattacaccaaaaccccttgtgagaggaaagggaggggggggcttagatcgaggctcagaagctgacggccgtatagctaatttggccgatttgccgctgaagaagtgggacccgcaatggccttctagatgttagcccttgacgtaccttatccgataatccatcctgaattgtggaaatatcttcgctaatctcgtcaataaaaaaatacagagccagagagaaacgccgagactggtacttcggcccgagccctagtgatgcgaccatacactgaatgacacgtgttagtttagttattcgacatatgcatgttaccctcgcgtgggtgcactatgggtgcacgtcactatagagtagctactttaccccgctgctgtccatagaataatccatatctatctttccctgagctaccagtgtgccaatgcacgtcacgagtcgcctacacaaaggccacacaatcgagaacacgtcgcgaacttccctgcacttgcatacatgaatcgcatcattgtttcttcccctcaccatgagacctatcttattggcttcgaggctaaagtacgcaaagcgaacgcctttgggtgatactcacgaatatataagccctgtcttctctgacacaaattggaggccgatcggtttttggaaccttccaggcaccctcaagccagtatctcaaagccatcttttattatgtcttcgatcgattcctcacctttggtcaatagtggcagcctaagaggttttgtcaaatatatgggtatactggcgtcaagctctgaagctcagtttgcatccgccgtgcttggcgagatcacccaacagcgtgagcggaaccattttcaagaagaagagctgaaaaaacttcgaaaggaaattctcgagatcaacgaaacaaaaagaaccacgatcgcggatatgtttattgccaacgagaacgaaaaggcaaaacagagagactccgcgacgcaaatcgagtctcttcgcgctactatcgacgcaaaggaaaagaatattgccgcgttttctaaggttctcggggcctctaagcagaaaatagcaaagttggaattgaatctctcgcaggagctcactaaaggcacaaaatctgccgacgaaatcaatgtactgcgagaaagtttgaaagagaaggataggacgatagaccaaatgaggactgctggatcgaaattgaaatcaatgctatcagcggaagagaaaaagaccaaagacctggaaggtgctaatacctcgatggatacagagctgcaggcagtgaaggctcatacccagaggctggaagagtttcctatccagccttcggctattcttgaggatttcgtgtaagtcgtgcgatgaatgacacaactatttgtattaaccgttcctgtatcattgacagagtcacgaaatttacaagcctgtggacttctgctaaaagcgggttattcccattgctagagcaggatgttccagaagatactttgaaggttcgtcctcggccatcttttctcacgctcgttactgataggatcaaaaggagaagtctatctgggagaaacttaggaaggcggacaggatactcctaccaccaagctttcctcttataccttcaaattctttggctgctaaagctgtacgatctgcgttgatcctggctgttctattcagagagatcgatcgacgtatattcaaaccgagctattttctctcagggagaaacagtcttcatgaggctctcagtcatctagcagagaataatggcgagaaagaagctttttgccgtcgcatacttctctctattgacccgcacgctgaatacgtggccctgaaagctgagattcaagccgtggtccagacaatgtcttcgtttgtggaaggcctattccctgaagcgcaacacgaattgtttcgtacaaaaaccaaatccatagttcaggacgcggccgaattttggcttccaattcagcgatcgcaacagaaattcgagatagatttcgaaccgtctgatctcgacgacaatgaatgggatcgctttcctctcgctggtgaaaatacaaaaccggtggcacaagacattcatggcttttatcttctcaatgtcttcccgtgtatctccttggtagaagacggcgaccatgatccattgaccaaggtcattcaactccgtgattcccaggaattatacttggcagcgcagaatgaagctactcaagtagcaacctctgctattaccaggaggccccgccccaggaggcaatcaactgcaggctcaaataggaggccttttttaggtgggaattcaaccaaaggctgactgataatctgtggagaagggtttggaaatgctgattgctctggagactgaaggagagtataatggagatgagatgaccatctgaggactatcaacaatagtactctatatgaacatttttgggtcatactcttcttatagtttatatttccctgtatgaaataatgtcttaagcctccagccatatctttgcataatgacctcgcacttgccaatcgaatcgttccttcctgaaccgtaagcgaggtcggggcttgcatggtttgtggcgagggagagcacaaaacccagtcgaggagatcgtagattgttttctttttcttttccttctctgtacttagaattcagaattgactatactcttttcttctggaaagaactggcatgtaacacctggaatgaagattcgatcgcaccagctggtgagatttccattagtctacgcagaagcgttcagggttcgaatcggcttttaggaagtattttgatgcataaactttttaattagcaccgctcgttataccatatatacaggaatgaatggtatttttattaaataaagctttcagcaccataaaaattcatgcatttcaatttgtggaggtggttggcaagctctctctttagccctgtatgaactatgggtactttatacttctgatgactagtatttaactataagtatcctgggcacttccctacttgcttctttccttccttcctacttccatcttttctcttccacccatcaccatcatcaccatcatctcctttcttccatcactttcattgtcgcttcacattatggcatcaggacttcctacacacgagctacttctcatctcgccaaaaacgagtccgatagattcctcgcctcgtaaacggaggacgaccccgtctcccgagtccatcctgcccaaaaacgttgtgttgttctctccccaaaattcccatctacagcccctggtagctccgcccgggtatgattttcaagtcattgttaagtgataccgactatttcagacatgcaaagctaatttcatatagatttcaaacctcccccatcctcttcaaccaatcttcaccggcatccctcactacatagtcatcccgatcctgcagcagaaccgtgtttaccttcctcgcgtgaaatcatttttcgtttcgacctgcgccaatcttcgtggatgttttccgaatctcatatcctcaagcttctgatagatctttttccaactacacaggcggttgagtttgatgacaggattctgatctttcgcgtcgaagtactgccaccgaagccctggccaaagcgaattgcaggtgttccgtgttatctgacggacaatccgaacgataagggcccagccattcccttccgctatcgaactcgttcgaatatccaaatctcacaggaccttgatcttcgaaataagaatgactcactgaacctcatatccgatctagtacgccagttctttgaacaagctcgaatcccaatcactgagattcaggtgtggggccatatcgtcgtcattgttctcgaagatcgaattgaccacgatgaaaatgctatggataaaatcttgcggtctgttccccgttctgttgcccgttgcaccttcttgtacctttcagagcatcacatggatcgcccccgcacgctgcctgctcaacgacttcaaaccgcctctccatcgcgatctgacggctcccagtacgatatactgagaccaggggtgatggtcagctccggtataaatctcaaaggagagtcaatgcgttcgtcctccggtgtcctagtcaaaaataatctgggccagaaattcatgactgttgctgcgcacgggttccctgccgatgcaaccgtttaccatcctcatgccggtggcagaacaatcggcagacttattatggaactcacgcatacggacgttgccttagttaatctcgaagatggggtggagtttgtaaatgaaccatttgagaacaccctaacgccagcaacttcattccgactccgagatttcattcggattgcagagactcagcagcatgatctggtatattttgatagtcccttctccggtcttgctgaaggcgagcgaatgtctagaaacaccatgcgggttccatccgacgacccccaagagccccagcagatatgggttacgacacaatggagctacatgggacaagattcggctgctgatatggttgacagtgtttgtagttctgccatttggaacgatgaccatagagttctcggctttttccgttatgccccggttgaaggtttatacaaagattattgcctgagtgttgctgcagatcatctgatcgacggaggatacagtgtggtctagccccgtcctttctttcagttatttgctttctctattcgaaaagtgatcgatggagcctgggatattcttactgtttgctgcggaatttgcttagtggaggcttgcatttttttaattttccagttcataatttgcccttagggaaggaatacaacttacccgcagagatctacccttgctcggtaccccgttgagaacggaagggtttggaactcatcactttgtctctcacttatctcctacttatcaatcacctcatcttcactgttgtgatcctgctcctctaaattggtgaccgaaaccccaacgaagctcgaagaagtttataacactatattctttgcgaggtggtggtcacctgaccactctgacaggtggcggaaggcaccaagcccctcggactagatcgtggtcgtttcgcctagtagaaatacaactctctccctctttcttccgcgccacacatagtagcccctcaacatatatcaataagccttgatacccttccctaaatgtcggtgcccttgctgtccccgttgcaggtcccctgttcactagaaaaaaaacgatctttctgccgcgattctactcaccttacataactatttcctaatacgaagaaaatcgtatttcaaagccctaaagccgtggccggtaactattgccagactctaaccatatttcataacgggcccgaatgataagggtctcatgactagcttacagccgctgtcgcttcctcgtagatcgatcttccaagaaagtccactcctcagacggcaacatgtgcttcgcctggcggcttatatttcggtccagcaagcacgacaatctgtctccttccaataccccatatatttcaatacgcacagtcttgcaaattccatcatctatcttagcataaaaaagtaggaaattttgagctgtggggtaacactctaacatccctctgtattcaatgaggattgcgatacggggcggcgtcgtaggtattatgtcttggttggtagtatctatcaatctgttcacttagctacaaacattgacagtgacttagggtagaaatatacccttatagagaaagaaaggccatgatgtctaggtatattcgtctggcggttcctccgggagaaagatatcaagttatagaaccacaaggtgaaggataagagtactgtttactccgtactgccctattaacgcattgtctccaactcattgtccctcaccaactcgttatcccccgataacgaacccctaaccgttgtagagaacgagagtcaaaattctgttattttggtaagatcttgttttcctttgaagttcgacatggtagtatctaattcttatctgagatttgaaggcgtagcttatcccatttacttgtgtatatgtttgagggagggcttgttgactacggtatcacgatggtgatacatactacaaaatcaatcagaactagagttccgaggttgaaaaagcaacagagtcgacagccgtcatgagagttttccagttttgttgtttatgttgtagggtttctcgttgggcagccatgcctacggagaaaggatcatccgttcctgccaatttctcaacctctgtaagtcatgtgatctcattgcgcaattaaacaccgaataactacacatagtgtcagaaatggcattgatcattccaagaagatgatatgggaggacaggtctcggtgacgggaagcctatacatggtagaagccaccctggagatagtcaagaatgagcctttctagaatcagcttgtgccctgtcatcgaggactcccgaatgatagatggattagcgctaggtcattggcaagctctctctctctcaatttgattatcaaggcacaaaataaggcatctaggcatcaacaccttcctaaagagggtttcgaatcatgaacgctatgtctacgtatcccggggagggtcacagagaattagggcccactactccgtactctgtaaagaaaccgaccaaagaaccaaacatctgagtcaaaaagtcggtctagacttttggaaatgagtcattgccaaaagcacaactctcagtactctgtacatcaagaactggttatgaaaacgagatgaagtcgaggtcgccatgtaaaggatactggcacctcccgtcttagaccaattattaaggacattgaaaccaacgtggcaccaaaagtgtcaacctaaaaggctctctagcataaggtgccaaggttgacatgccaataaccccacctctgtgtttcgcctgcatccacatttcggcattctcggagatcctggctctatcaggtcggtctccgagattggcgaccctagaccttcttttcgggatggaaatcagtcaactatcatgattccatagcaacacgagaggcttccgtagactcggaagctgtgtatctaggaacaagcgagattaggagccttttgatataactttgtatgtagacgtaatatacaagttgtacatcgtaaccttggaaaccataaaaccttctaagaggtggaccgagcttttaagatgtggagaagagattggcggcgcactgtgattggatcagactggctgactcagcttggatcgaacgaacgttatggcattatctcggattatcgaccggcccggtatttgtgcggaaaagaaccgggtattcggtaaagtcgatgatcggctctgttatatattatttcctcctcaacagattcattgacctctttccctctttgccttgaaatcgaatttcctaatccctgaatattcaagatgattacgtcatacttattgcccgcagacagcttggtgcttgttacaggtgccaatggtttcatagcatctcatactatcgaccagttgcttgcgaaaggtttcagagtgcggggcacagttcgcgctcccaagccttggctcaatgcctttttcgatgagcgatatggcaaaggacgcttcgaaaccctggttatgaccaacctcggtgatgcccaagaattggataaggcaatgaagggagtttcaggtgtcatccacatggtcagttctatacaaaaccatttaagaaggcaataacttcaaatttctaatcattttcaataggcatctgatctgactttcagctccgaccctaatgccgtcattccttgggtgaaggattctgtgctcaaggttcttgaagctgcatctcggactgagaccatccaaagggtggttctcacttcgtcgtcacgagctgcctttacctccttgcccggtaccaccaagggtcttactgtagaggatagtaagtatttcgcgcattcaagtctcacgcattgcaggaggcgcaaactaacatcctttagatacattcaacgacgattcagtcaaggcagcatgggatccagatacccccgcggatatcaagccctttgctgtgtattctgcgtccaagacagaatctgagaaggccgcatgggaatggatgaaagacaacaagccccacttcgacttcaacactgtgcttcccgacttcaatgtgagaattttcaattctaaagaaagccacgaactttactgaccaaatgtcttttcatgctttagaccggaaaggtccttcacccagagattggtggctcgaccatgggctatgtgcgcaagcttctcaagggagatagcagccccttcgagactttccctccccgtaagatcccattttctctcccagtcttttggaacattctctaatacttggtccctacagagtggtatgtcgatgttgaggacactgctcgtctccatgtcatcgcactactcagccacgaagtgaagtccgaacggctctttgctttcgcagaatctaagaactggacagaccatgttgaagctcttagcaaactgcgccccgacaacaaattgatccccaagcctcccgtgaacgaagctcgtgacgaagcaaatgtcgttccagccaaaagagccgagtctctactccaatcattctacggccggccaggttggactccattccacgagagtctcgcagctggcatcgaagggcttgaatagaagtgcgatgaagagctttatatgtgttcgaaatgagggcaccagccagtatatactagtacatattcatcctgaatgctgcatgacctctgcatgggaaatagcccacaacaatacatatgtaccggataatgcctggcactcgagacctttccctttccgttttagcgctcacctcttgccgctttttgatcaccgagtaaaaccgagcacgtctctgagacacggcacgtgtacactagggcatgtagtgatagttcagtgatagtcgccctctcggcttaggtttttgacgcgacgcgctgatcacgatctgtccacgtgggtccccggattttcgtgctccatttttgagactacataaatcgtggatgattcacgacctacttgaactgggggtggaaaattatgattaattactccgtgaaaagttttcgacgcattgaaaatgaaatctagcatctatgtcgcgtactagactcggccacttctcattacagaccgtagacaatagcaagcacaggcccaacaatcgccaacgcaggtatttcacagccagcagctaagccagtcgaagtcgcactcgctcctgtctctgtagcagcgctttgagaacttccagagctatctgacccggtcgtagttgtagctgtagctgtcacaacattatccgttgacgacaccgtaattgcacgcgcgatagtacccagagtccaagtaaaagtagccccactaacaggagacgagacaacaccaccggtattgtacaacttctccgtcccatttttaggaagattgtccggcgtgtagaaagtatccgtaccgcccgcaacctcatctccaaaaccaagtttcttacaagggaatttttccatgtaagtactacatgcttccccatcttctccatccttcaactgtccaagccagtagtctgctcccagaacagccggatctgtattagggcattcgtcccagatggtggatacaatcgcgctgtaggaacagcaaatgcaggcccggccatagtcggacaattcgtcggctgtaagctgctccaatgccttctcgtcattcccgcacgtcgtcaagtggttgtttatctgggtggctttgaggtcgattttcgcgaaattgcaggaacagccgcccgtcgcgtttccgggaaagggccagaaggggatttgttcaaggtcgactttcgggcagaagttgactaagttttcgccggttttttgatattcgcaggaatagacctagctggagtgtcaatttatggcagggtattctagtttgtaagaattacctggttccagcagctctcagccatgcaatcgatctcattggcattcttgatgcattcgcaaacattgatacagtcaatacctaggtttgggcattgagaagccatgcatgaactatcgccattgcatgctttgtagcatgcagggtctccgccagcgcagttgttattgatgcagctggcgtacctggtatccgcgtcttcgtagcatgtctttagaccctttggatcagcgcagaccgacgaatcgtcaaaatacccgactttctcggctagcacaattctggaggccgccaaagacagcaaaagaaacaatttaaatgccattttttaagcgcacacgagatacaaacacaaaggatgtgaatagggtatttatctaaaaattcatgacctgtaaagccgcaaggtccaaaaggctaaagggtcccaggatccaaagcgtggctagtgcttacgcccaacacctgaccaatggggctctaaaaagacttggcactcagcgatctcagtttgtttatagctagtccgagacgctgcttcgtttgattttgcccgaactggcttaatttgacgctttgccaagatcaagagccaattccggtgccggctctcctgtgtccatttgcaggggtacacgcttggaagcacgttggttccggggcggaaaagccacgtcttggcacgggatttgaactaactgatttttctacagcctcgggaaagttgttgcttttaaatggctcgcaatgtggcttcaacattggtggctttaaggcttgtatgagactgatagcgattttagggttcggaatagttcccgtgtctgctctttgggaaacaatttaaaccgcagtttgatcgaaacaagtgttccattcaggaaaaggaaaagggaaaggcttcgggagaccatctacccaaggcttggatgtggtcatcccttaagcctgtgtcgtgggtgtattgtgctggcccctccccaaaactgtgacacttttatccccgtagtatcttcccggcgcggttaagcttagagatgaccgcagttgaaaggcgggtgacgtgaagggaccggaagagagtgtaaatcagggagcagtcgtagactttgagtcatggaggaatagtttagaaaggccttcgacgggacaggctgcatcttttgtcgctgcaaggacaatattgataccttcgtggtttcggtcggtcttacttacttttaaagtaggggaagacatggtccatagtaggggtaaacctgatatcggccggggttaacttggtagcagcgaatacttcagtgtttctaagttcggcagctaagtatgtaaattttccgactcggaggaaccccgcgaaggcaaccctggcagcggcggcaagattagggtcatttttctgggctgctgagagccttagcaattgggtagggaggtgtgagatattccctgaaagaattatgactgaggccggtgagattgggttgggaactgcgcagagcaatatcctcttctggttccctgtgcaaggccattccagaccagctttgcatggccagcactcacgaaaatgggctgtcgggagaaataggtaggcggtggcgcctttcctatctggtcttgcccccgattttatgacgatcaaagagaaaggccacacggggctatttattttgtgttgagtttgtgttgagtcgtcctggtattgagtgcgttgacgatagttggctacgctcgttttctggaggatcccgtaccatcaaaaaatgcgtcgtgtctatcaaaacgcaaataaaatagagaagcgcatcatattagaatggtctagttttgaaaagaaaatatcgagccgctcgcgcacgttgcgctggctaattaaatgacatacttcgaaactgttagcacatctccactacccggaatagcactatgaacttactgggatgaacaggtaggggacttctttctcgtagcgcttccaggcctcgccgtactttcttcggcatctgttgatatccctgttggtgcgatggatgatcataaccatgaagaaaatgaagtagaaccaagggaacgggctcctatcaatagtagttagttaccacaacatcacggctttgcacataagaagtcttacttgaaaccggtgatcagaccccaggacatagagaaaaacatgtcaggaacatagtttggctttcggataattgcaaaccagccatcgaccatgatatggtcgcccgcatccgtttggatggttttgggattctcgatagcctgccacggcacttgagggaatgtgttccgttgtatgagctggcccttttccttgtggcggaatgcattcttctgaccattggcactgtcccacatccagtagaagaaaatgtacagagcagagaacactgcgagagcgtaaggattccagtggtattcggatgggtggtggttggccaagtagagagcacagtggcaatatgtgaagggcacaccggccatattccaaaaggtgagcaaaaagcctagcttttcaaaatacatgtccctggtatagtgtcagctcaattgtaactattgctccaacattttattaactcaccagctggtaataatcatctgctcagctttggcacacgcattggtatacaagtaatgtgccaccaccaagaagattacctcgggcgaaacatagccgtaagtttcgtactggcgagcagccacggagcaggtgatgaggaagagaatgaaccacgggatccggacttcgtaaaacatcttgaagtccaggattccaatgcggggattcagctcggcgcccataaagaaatcgtagattggagagcccgatagtctgtgggttcggccgcgcacgatagcttggatgtagactatgaagctgttcaagaagccagagaggatagcgacactcatgataggtccaaactcgtcaatcagcgtgtacaaagggaatacacgagtaacgtgtaggacaacagcgatggcgagcgtcgcatagaagctgcaataagcggagcagtagtaggggagcctcttgccgccttcgtgcctcaatggccggccgaaattcgaaacaccgggcatgtagcaatacatgagtgcctcgaggacaaagaatgtccagtatatcgcccaggctttcgcgcttggataagctccctcgtagaccagctgacataggtgacggccaaaatcagcccaggtctggttgggcttaggcataggaagcatgccatcatagtacgtggcaccgatccacatgtaccacatcaacaaaggaaatcccgtcatcaacagcgcagcaccgaatgaaccaccgaattcgaattcatctgacgcaccgtcagtaaacttggtcggggtagttgatccatcctccttgctcctattagctggaatagaagcaaccggttgggttctctgtcttatggtcattgccattgatcgacgtgggtgagggaagttgtcaggatgtcgaaagagaactggcccctgatatttttgctgggattagatatttaagggcatcaggtgaccacgcgtgcactcgtgtattctttggtggcttgggggccaaaacatcatttccacacaaaacgagtacctactcaataaaaccatcatttcaacctatacccctatagtagctataataaatttatgctacataggtccctgagatcccgctctatccttcgactatcaatttcctcgtttttctctacgcgtgctgagagatcggcccgagtagtggcggttgtattatacgattttcgcgcctaccgaattactcggcgcatcccgagcaaagtggggctgggaaaacgatttcaatacgataaaaattaattttctgcgtggcagaaaatagtcagctcgccattagtccgcagctgtaatgagtagacaacaatttacccctacgtttcctctaattactaacttttctacggtcgcattgagctcagatcgtaaaagtatgattaaaataccttttttaacaattgtatacgttttgacctaaatgcgactagtagaagccgatcagcaagcacggagcaagcaaataaccaagtaaggaagtaagtaaaccgggcgtcggggccgtcccgaggtcttccaaggtttccatccacccgtagaggtaaatgtgggtggagaagaagaggctctaatattacataccgggccgagaccataattacacaggcggtgactaaagcggtgatccaaaaatagccatccctgactttagcgcccttttgggtaatccctcttagcattcggagtcaagagatgacagacttcttcctatgttgtagttaaaccttgtcaactcccttttagtcctatcaccctggcacccctatggccataggatagcatttcctatttcggctgcccatgtgcacaaagctgttgaataaccagagaaatagtggacttttgttgccttcacttatgacatggtctattaagttaactaataaattattttaagtgaaataatatctagtccatattcctgcttcacacctcacccctgtgttctgtccatctcatactaccaattggaacaaccggccccatccctggaccgccgtcggatcaacctcacacagtagcaacatgtcccaaatgactgtgctcaccgtatccaaaaccaccacaccatgcgtcttttcccagtagttcacccgctgagcagctcggagattggtgcaaaaggtggaaatcacctgcacctggcggctcgcgacgtcggctaccatctcgtcgagggtaggctcatcaacgtcggcaaatgaagtgttcctcgacaatccaagatggcgttccttgctgcaatccacgccaattgtcttgtatgtctttataatggcctcctgtacgttgtccatgtacggtgtcacaagccccagttctgtagccgagagcaccttgagagctttgttcaaggccaatacggatgtcgtggccggtatccccgtcgccgcggtaatgagtgtgcacagctcttcatcggcggggaagcctagccacccagatgacgtgccactccagccaatgatgtcgacgttggcgtccgccagcagccttgccgctgccaaaatagcttcgttttggaattgctggagggcatcctgctcgaggctgatcttcaaaacggtaaaccgagaaaagtgaaccgagacattgggaatttgagcgatgactgcttgcgacaagggctcgaggctggtattggaggaaggtgtgagaattccgaggcggatacgcttagccattgtagagtgatgatttatgaatgcaatatttaacagctgaagaattggagctcaagaagaagaaatagaactaggattgtaatcaaatcatgaaagatttcagcttctccccgcattcccccacgcgggatacaatcaggaaatctatatcgcccgatctttcaatctttccaccaattttcggcctttgaccgagatattattcccccacattctgattggtctccccaagttactatcagtatctagactccaaatcagtcagaatgaccccaatcgttctttcaggaagtatgttgatgattggggttagagatggcttaataagaatcacactgtcctcttatttcgtgggagtcatcgtcagttgaactaaacaacccaaaatgtcgacaataaggcagcgatttacaggtgccaagcgggccttctccagccggcgtgcgctattggaagcagttcgtacagaaaacgacggggaggctggcctcttcggcagctggtcaaataaagatttggacccgtctcctccttctcagagaatatggacacgttggtctttctttgcttttcagtttagcatcgctttttcgccgaccacgtacaatgtcggggctagcctctacgctgtcggtctcaactggtggaccatcttgatagcttcctgtgagactatattacatacctggtggccgacggtgctaacatataaacagttatcgtttctttcttagtgggtggaatgctttggttgaactcccgtggagctgcgatgtatgtaacttcacatctaagtctagcattccatgtctaacgatggtttctccagataccacgtgggatatccgacttacgtgcgggcttccgccggtatctatggatccctaatattcatcttcctccgaggggtatgttgcagcaccagcaagacttgagagcacatctaattccactccgcaggcggtcgccattttatacatgggaatccagactctatacgctagttattttgtgaacgttatgcttcgttgtgtctttggtcacaagtggactgacctcccgaatcgtatgcatacctgtcttgttgtccgttccagagctaactatgtcttcagatcttcccaagtcagccggtatcacatcgggaaagttggtttccttccttattctatggcttctccagttcccgttcgcatttgtccacccgagcaaaatgtcaaaagtgttcatggtgaagtcggttattgcaccaattggaatgattgtgacaatgatatgggcaatcgtaagcatactcttggtcttatttgagggcgttatggcttacaatctgttagatctctagccatggtgtcgatttccacggactcggacctagcaatgtgtctggggccgtcctgggctggtctttcatgaaagcaatcaacagtattgtttctaatgtgattcctccgttggttaattctcctgatctgacgagatatgcgaagtgtccacgcgacactctgcccttgtctattggaatcatcttgagcaaaccagttgtggtgttcctgggaatggtcatcacagccgctggttacaaacagtttggagaggtaatctatacatccagtgcttgctcattaatccgatactgacttggaaataggcatattggaatatgtgggatctctattctagtatcctagaccattactggagtccaggagcccgaacggttgtgttccttggtgcgggtattcaggtcagcaacctatttagcaagatataattgcccctactaataactttgacaggcatttgctacctttgctacaaacctcactagtaactcaattccagtcggatgcgatctcgctggtctgttcccacggtacatgacaatcatccgtggccaagtgtgctgcttcttattggcgtgggtagtgggtaagaaatcaaactattatcatagaaattcaccagtctcaagctaatcacactgcacagttccatggaaaatgacctattccgccgcgtccttcctgaccttcctcaactcatacctctgtttcatgtgccccattgtagccatgatgatgtacgttcccaaatttgccccggaatattcaaccactaacgaaccctctatcagtgttgattactggatggttcgcaagggaaacatccatgtgccttccctctataacgcaaaacccggctctccatacttttatactggtggcttcaacctacgcgcatttgcagcctggatcggggcaatcgtccttgtcattcccggtgtctctggcgctcttcaccctggatcgatcggagacgctgctgtcaagatttacaacatgggcttcttgatttctaccactttcgcggcgctgttctactatatatgctgcaggatttggccagtgcaaatctatcctaccgagctgggggcaaaagacgctagttgggaggccacgaggtacacagagggctttttccctgaagacgaaatcgtgccggactatttgcaggaaactgtgattgagggggtgacagtggggccttcaaaaggctcgttggaggtagaatccgtcaacatgcggaaggagggaatgttgtaatggctgaacagtgattttatgtgtttgatggattttatgtagcttttggatttgaaccagtacgtagtaataagaattgttaatcatatttccttgttaattgggttctgataattttgacttctccccatctccattgctcgtaaattttctcttacatttctaccgtagcccctcagcctgtcctgataatgcctcgaggctgtcaaggcaattaccatctaaatgtccatatgaggcaatcggacctttccgcaaagataaggccgtgttccttggcaaacgatcgggcgatcgggcgactgatcggggagttgataatattgttgataatcggatttcggaccgagagagtatttagcaccaatgagactaaaagctaagttttttatcaaagcctcaaagcaaattcgcaacaatgaatttaccctcaatggctagcaaattcgatctggtggtgctcaacgggaaggtagtcactgccagtgacatttggtatgttgttctcccctctagactgtctataacgtactaacaaagcgaagcgactattgcattgggattaaagatgggaagatccaaaccctcgccgagagcttctcggaagatgagatagcaggcgccgaggtcatcgatgctgagttcgttccaagtaggcctcatgacgtggatgtggaactctaaccattgcatctatagaggggcatatgtgatgcctggtggaattgacgctcacgtccacttatgtcaagatttaaaaactggtgagttggtacctcgtttacaatagacttttcctaacattaccaggaccacacggtctaggaggtgaatgcgccgataacttcgagacgggctcccggagtgcagtggccggtggcacaacgacaattatcactttcgcgacacagaccagaggagaagaagaccgaagcctgatcaaggtcgtagagtcttataacgcgcgtgccgaggagacgggcagctacgtggactatgggttccatatcattattgttcgcaatgatgccgacgtgctggagaccgaactcccgattttgaagaaggactggggcattagcagctgcaagctcttcctgacgtatgaaacacaacggttgacagattcgcaacttttggatgtcatgtgggctgctagaaaaaactccatcactacggtaagtatatttctgaagagaaacgaacgacgctgattttgtagatgattcatgcagagaatggggacatgattgcatggcttacacgtaagagtgattgagcacggtgaagaatcagaagctaatcggatgacagaaaaactcgaggagaaaggcatgaatggtatgtctatttacactccggtctgttgaaattttgcttacattttatagctccatactaccacgccttgtctcgcccacctcttgtcgagggcgaggcgactaatcgcgccattgccttagcgcaattgatccaaaatccgattcttttcgtgcatgtcggctctgcagtatgtctacctctctgtcatctcagactgaagctaactttttcagcttggggcggccaatgtacgtcgggctcaaaatatgggattacccgtgtacgctgaaacatgccctcaatatttccatttaacatggaatgacctggtaagtttcctacatcgatcgacaattggcaagtcctaagagaagctctagaaacggttccattcaccaacttgtttcgaaaacagcaaaatgatctgctcacctcccccacccccggatgcttctgaccaggaagatttgtttgtgtaagtctcgtgtgcaagtgtcataccagtaaattcctctaatttgcatagtggccttcacaatggaacattcacaatttactcatccgatcactgcccttttcgctacaatgacccccatggcaaggcttctggagtgcttgagcacgccaaaagcatggaaggggagtcaccgcatgcctgcgatgatctacatgacctcttgacacgcaaggaagggtcatttaaattgattcccaacggcattcctggtgttgaaactcgactcccattactctactctggggcactatcgactggccgcatatcaccacaacgctttgtggaacttacgtctacaaatccagcaaaactggtgaatactcttcaacttcgtctatcatcctatgacatcgctaactcaatatagtacgggttatatcccaaaaaggggacactgatgccaggatctgacgccgatttggtgattgtgagtttcaatttcctgctacaacctccgattcgagtttctaacattgcgaaatcagtggcaccctgagaagacgtttgagccattccatcttaccaacgcccaactccaccacaatgtcgattgtaaggaataaattcacaccatgtctacgcatttaactgactgcattacacagatacgccatacgaaggattcaagatgctcaattggcctcgttatacgattctccgaggcaaagtgatgtgggccaacggtaagatacttggtaaggtccgggatggccagtacgtgaagcgtggtccaagtcaactgagccaaggccttcctggagccgatcgagacccacgacgcgttgcagcttggctctatgaatgaaataagagtgtaatgatgcacatactttggcgtcttcatagacttatctagctgagacaaacacgatcaatatagacatggaaaatagagaatacaaaatgggattatgcctatcccactcatcgtggaaaacgggaacattggctctccttctatagtcccaacttcatccttattcctaggcacaaataaaaattacgtaaggtcgcaccttccgagattattccgaagataagaagcttatcgcccgaaagataaggtttcccgtatccatggatatcgcgcgaaagagaaaggcaaaattcccctatcacagcaccttccgggtatggtatggtaattcgggtatgtgcaggaagaactgtcaatcggaaaaggaaagcttggaagaatcatccaactatcttactatcaggtcagccttctaatagatccatggatacttccaagctcctgcggccattccagcagacgcggtcatatgtggctcacctcggctcgttaccatataagcttatcttcccaacttgcctagcctgcacaacaattgggtggtaaccgttagcccccgtcccccccacccgggcccgggccccctagtaaatnnnnnnnnnnnnnnnnnnnnnnnnnnnnnnnnnnnnnnnnnnnnnnnnnnnnnnnnnnnnnnnnnnnnnnnnnnnnnnnnnnnnnnnnnnnnnnnnnnnnnnnnnnnnnnnnnnnnnnnnnnnnnnnnnnnnnnnnnnnnnnnnnnnnnnnnnnnnnnnnnnntcggtcgccacgaccgaggccaggcccatgtagtagatagctctctcctcatttctctcctttgattttccctgtctgctccactacatactggagcagcacagttcttctctcatagagatcctcattgtgtagcagtttctaggacaaccaatctctcgtctcccttcgtgccgtcgatggcctgcccaaatggatcactctggtccaaccgggcgtgcatatagatcgaagatcaaacggccttgtgaccgatgtcgactcaggaagacagcctgcgtccttccagagggcccaccctgcaggagttgtttcactaataacaaagaatgcaccttcaaactgcgtcccagattgaagacccggcgtatgagtacagaaaatcaagctcctcacgctactgcgtcttacgaggtgccaaatccaacattgcaactcagtcctgatagtactcgattgcaccacgacccgttcgaccaggacaggggctactcctacaatgatccagtccaaatgtggccggggcaacatgctcaaaatgagcctcaacctgatctcatgacccgtcatacctcaatggaatctatggatgaccatcctatcagtccggatcaagagtcaccacagcaaatcggggccattaccagtcctgcatcgcagcccgttcagcgcatccggtcgctagatctcattgaaggatcgatcgcgcagttttacggcatgtcctcggagtcagatccgtggctgcttcgacattgccgatacgatgaatatggcatgcgcagcctgcatcggactcacatccgtaatgtcggtggcgtccccgttgaagggctggtaccggtccattttcttgagaccgagaaggagcttatgctgccaaaaggctcagatatggataatcggtctcagaaggacgtgatgcaagaccggaaccaactcaatgatatggtctccccggaacacggcaagcggcttctatccttatttcttcgattcgtgttcccagccgtcccaataatatccaggtcccagcttggtattacttcaggagtgtcgactgctgtgttggagaagatccccgttcatttgcttgcggcgatttatgcctcggccatccctttcgcagtccatgactcggtgctgtgtgtatctgccgcatatggggagctcttgtccgagaagctgtggcatacggtctacgagcttatcctccaggagactcacacaccaaagctggcagttttgcaagcatctttgctctatctgcaacaaattcccgccggaagcctgaaagccctccctgatgggccattcatttggtctttccttgggtctacagtggccctggctgtctccctcggtcttcatgttgaaccccggccatgggggattcccccgtgggagaagcgcctgcggaggagactgtggtgggcagtctacgtagaagacaaatggcggagtcttcttacgggccggccttcatttatccaccctgatgagtttgatatctttgaccttagtgccggtgatttcatccaagatgagaaagccgacgaacatgaccataattgccagcctcttttctactacactacaggtttggctcggatcatcgagaatctgcatcgcacattttagtaagagcaatccccacccctggttaattctgctattaattgaacagtactataaaagcctctcagagagtatcagatgactttcgcgcgtccatcgacgctgcacgacccatccgcgcccagcttcaacaatggtacttatctcttcccgatactcttcgactcaagcgtggctccgtttcaaatagccacatagcatctgacccaatcgagggtgcgtccgaccttcatttctcatacttggttcttgagatgttcctttaccgcgccattctccgtcctcttgcccaatcaccgccaccgccaccgatctcagacgacacagatccaaccccgatgggagctttctggctcgttgaagacctaacgttcgacactcacggcttcgatcaactcccagccatgaattccatgcagcttggcgaggctgaagaggctaccctcaaggctgcagaaaagtgtgcggccatcatcgtcaattttgtaggagccttggcgccccatgagtttggctccttctggcatccttgtaggttatccgttcatccgcttctaatgtaatgatggaattgtatactgactatctattttctagggaaccgaatctgtttcgccgcagtatccaacttcgtcactctgctccttgttcaagcgccgaccaggcaacatgcattgagatcgagggatttgcttgagctgtggtcacacacacttcgttgccagcactggagccacgaaggcctaatgaagctaggtctagtgcgactaaatcagatgcagatcgagggattggagaacatcttcaatttgcctgcgcatgtatccgagatattaagggatacacagcaagattaaatccctagtttcggatatatggtgtacaataatgataaaaacacaggcaagctagttcacattttcagagacgacaaaggatatgaaacgatttttgccgagagacgcaagattgcaaacttgagacggtctgattattctgatatattatgcctaatatgactccaattcaagctgtacgatactaaacagataactgtctttccatagcccaaagaacaaacccttgattgtaaccccaggtaaaaggaggataatattgttcccccacgacgcgaaacccccttttcagccaataagcaccctggatctcgcgaatagatctgagcgtaatgcacaagcgagacaattcaatatgccccacaagagccattctcctcttcagctcctcttcacaagccctgattaagcattccgcaatgcctttcctcctatatcgaggatccggcttgatcgcaacggctacaagctcgaacccgcccttccaatgcgcatcccggtgtttatcgccagaactatccagcaccgcagagctcgcggagaagatctcatccgcagtgaattgttcagaatagcccgggaacttccacacgtcttcgggatctggcgagctgatcttcaagctcgcagtaccgatgatggaattttgagcgaatgcaatcgccgtgaagccggtttcctggagctcgtcagcgagctgggtgtcgcttttgagtcgaagtccgctctttttgtaagaactggcgccggtatcgtagtagctggcgttgatgacgtcctggagctcttgcagaaagggctgcttgaggagatcgctttgtgtgaaggtttcaatactgtaggaaggtgagccttctacagtcgtagacattttgtggtagaaaaagacaccaagatgaaatgcggcaaagcgtatgatttttaagatagccgcaaaccccaattaccccaatagcagccagtctgtgcgcttctccacggtttcataataagcaaagctaaaagtacaaacaaactatgaaactctcctatagtccctctgtaaggtgcctgagaagaccatcagaaaggaaagagcgatggaaccaagacataccaatgttatcacagtctaaaaggcttgaagttagatgtacatcaaaacgaacgaaaaagtaaatatttcattaactattgcactataaatccttacccattggtatctccaaatactcaaccattctctccctcgcacgctcaacctgatcccgcacatccagatcccaaagccacttaaaacgccgatcaagggtatctctcagctttaccgggtcatcacgaaccccctcaaagcacaaacaaagaatatctgcattctccttgctgctagtaacaaccctctgactccgcggccgacgaatctcatcataagccttgaaagccgcaaccacgtcgacgacagagctgacacgggaatcactcagtagttcggcgaggacatgtgcatcttcgatagcctggccagcgccggcaccctggtgcggcgtagacgcgtgcgcggcgtcgccgaggatggcaattctggagcgggtgtaggttgagaggtgtggatgctcgaagatggcccattgggatgggtcgggcatatgctagaagaataagataagtaattcacttaaacgcaaataaagcatgaatcatacctcaacaagagccctcacataccgccccatatccctcgtatcccgctccatatcttctctcttcgccggcctcacccaagactcatattcccaatcctgcgaactcaacacataaataccaacattaaccaaacgagcccgcataataggataagaaatagcataagcgccgcgcgcgacatacatcgtcgcgaccctcgccctcctctccccaaccgcactcaccatatcccccatatccaggacagcgcggtatccatacataccactataaaccggtttcgcacgtagcgaatgttccaccggaaacatgcactccttaacccgcgagcgaatgccatcacaaccgataacaacatcagctttcacgacctcgccatcctcgaatcccagcacaacgccgtcatcaccttcaacgagcgtgctgagcctcttcccgaaatgcacgatctcggcggggacgagctcaacaagcgtgtttaggaaatctgctcttcggagcgctgtttggccagagggtagggctttcagatccattagtacgtcgccttcttgtgggcctgttgcccagacgagctcgaaccaggtctgtaggtaagaatcgtagccgggactgtctgcgtgggtggttatgagggagttgtagatttgttggatttgggggtggattagtggcattgcgcggtatgcggctgggccgagggagattcctaggcctatttctttgaaggttggggctgcttcgtagatttggacggggattttgcggaggtgcaggccggctgctagggttaggccgcctattccgccgccgattattgttattgtgggtttagacatggtgagttagagatagacggatgggggtgtgttggtgattggaggtgttagttatatagtttctaatagtttctgtgagttgtttaaatttgtcgggggttttcgtgagagtgtacttgtgtataatgtcgataaggttgagtgccatagtgtatgtactctatatcccacatgggcgtatggtgatataaaaccggactagtaccacaatgactgtatgtccgacgtcgcggagtcagatagaggggtgcaagctttcgaaaacgggaaattttcgaatggaagataggggattggacaggccagggaagtgggctatcagacatcccgcggtggcccttgatctgcactgttagcgcggtgcgtgtaatttgccgggaagtgcacggcatggacgaggggtctacatcgtaggacgtcaacgctgttacaaggattgtcttgaatggagaaatatgacattaaacctggaaggtaaaagatatcgccaatcgtcacgcgtcacgaatcgtgcgtttgcgtgtgcaactctaatctatcgtgtgtatcccattccatgagacgagagagcggacatgtgctcgacatgtagcgcagcgcggtgatcgaagtcgcgatcctgtcgcggggatgcccctaggggtctgaaatggcgcattggcatgtgcaaaaaaagacaatcctaaagtacattgtactcttcaggaagtctagatatatgagaaagaaaagaaatatccgctagaaaaaaaacgggaaagtcgcatatgttgcaacatgaagaaatcaaatcataggagcggtcactacccgctgacgctcccactttggaggaccgaatggatcatcacgggagtatatatccgaccgatcccaatcggagtcgctgtccgcaatacctgtgtgcttatcatccgaccgcaacgggggagaactgttagagtcatctagcgcgcgacggaagcgaaggaactgccgcgattccatattcgcaggctgcatcatgcccattcccatgcccgactgcatggactcgagtgctgcacgctgcaggtcgcggatgtcattgcgcagaccgccgacctgtgtttctaagtttctgcgggctgtttgttcgcggcgcaggagcgtgactagcgtgctatactgctcgattgagacgccgtggtagtcggacagggatgtggctgatgggacggggcgaagggtgcgcgtgttcattgtgtctgcgcggattgtgctcgtgctggaagggcgggcgggtatggtcgggagagggcttggggaatcgtcgcggtcgctggtggataggaatgcagttggtttgctgcgaggggggtaagattctgctgaaggcggatgtcgtgggcgggatagcttctcggtgggctcgggcccgttggtttgcattcgcgcaatggcgaattccaggtcgatgagtttcacttcgagcgtggtcaaccgttgttccagagtgacgccgtcatcttggtgcattgtgttaactagatttgcgacatttgatggaaggctgggttgttctgtaggctgctcgacttccaaagatggtgcggcggacattcgcgtcacactcgttactgttgtccccgacgaccgcctcctcgactgctcactattagaactttcatctaatggcggggactgcgaaacaaccgaggctggccgcgccggggcggatggtgtgggtttccaagagctcagagtctctgggaggttatttgtcatttcgcgcaatccatctgcgctccttgataagcggtgcgagagcaagctgtgtcttcgctctggcatgtaacccctatcctcttgcggatcagatactgccgacgcgacggcaaaccgagagtcatcatctgagaagaccacactgggaagcgttgcccgccttcggcgtggcatgctaccgggaactgaatcacgaagtgttgcagaggagagaggggacagcggagacaaatgattatctgcgatctggaggttttccgccgagagtggactgcggtgtgaattcaaattcaagggcggcggaacagccgacggtgatttccctttcggttgtccacctctccgcaccggtggcatgggcggcaccgcaaaagtagattcgtatgggtgctcctccagttcatcggcctggctttgtcttttgcgattgaagatcttgcgcatgaccgtcttcaaggtgctcccggttcggcggtgggcaatagagggctgtgagtgatgggagtggaattccattgacggcagcgccgtgtcgtcgtctgccttgtacgatgtagggttggcggagcagtctccccgggcgggaggggttcgctgtatactccgaatggactcgctgccagcgcttgctatggatcgggtggggtatctcgacatggtgtgtggagggtcgcaatggacaaataggcatagaaggtaagggtaaggacttggatcattacaagctgggtatatggcgcaaaagaaagaagaaaaaaagaaaaagagttcaagcgagtgtgagaatgaagggtataagggtatcaattcgaatcaaggctggattttagtcgagtgagactattgaaagctatcaaacgcatgttagctgaagaaccagggtgggacaaacggaacatacagtgttataatcaggaacataatgaacacccagatcttccagtttgctctgaacaaagagaaaagaatgactgaagaagaacaaaggggaagagaagttggagaagattagggagggaggaagagggaagacagctattatccccacaccgttctttctttatgccacgccagaattgatgtgttgaccacaaatacaaagtgatagttgactatttagtcagctacctaattgctcaatgcttcataaatggtttatgcaatactaaatactctactctatcccattctacctacttccctccctcccgtgaaagatatctgaaacacgccgtcctcaggtgacacgatgcagtttcaacttcaacttcacttcaacttcatttgtccacgtagggcctttgattcatgctatgcccctcagtaagaagaatctcattctccattaggaaatccatctccggcattcttatcttcgtgtcaagtcagtatttgagttctttaggttctttagggtgttctaccccctgtttctcccttgcataggccgtgcactaatttattttcgacagcgatcggcgttgttctggaactcccatctatagcaaatctccagcgtcgggataccgcagatcggcattttcttcgagaaacgccatccagtgcttaaggaaactacttccgctgtaaaaagatcagcattaaccctcaaactaatggcgcatcctgtacggagtacgtactgactgatcgtctccgagtctccgcaaatacacaaatgccgcttggggcgcgtcatggcgactatacacagcatggttaatatattttcgctgtaggtataacacctatacagtctgcaaaaaaaaagagaaaaaaaaaaaggaaaatcataccattcaatcgtcgtttctcacccaggaaacccacttcgtgctccgtattgctgcgcactagactcaccacaacggcttctttctcacggccctggaatccatccacactaccaagttcaagaccgggatatttttctcgtaacatccgcgacagtagagccaattgcccgttgtaaggggtgatcacagcaatgctttcgggcctgacacccgcatcaatcagattatcgacatgtctagcaacgaccatagcttccatctcgttgcttttgctgtctccaagcaaggctcctttctggctgatctcatcctcagccttttcggggaaatccccaccttgcgtgtcccagaatactaggggttcctgcgtgtcgtctgtaccctctacttcatagggtaggtcgattagtagacgggcttttaccgcgtcgctagctatcaatttgctctcgtagagttcatccgaggggaatcgcatgatcttctcatgcatgcgatattgcgtggtcaacatgcgtttgatccccggtccgtgcagggctaacaaacgatcaaataatgtgcgttggagggagacacctttcaatgtctcggtatcggtgttgtcggtctttacctcgctcttggaagttttatccttctgtccggtagatttaacggtcggtggtaattgcagatgatcaccagcaaggaccaccttctctgcacccagaagagaaatccaacattgtgcttcgagcgcttgactcgcctcgtcgataatcacaacatcgaacttctggttcttgagttggtgaccgccagccccgtgaagagtagccaacaccacgctactctcccgcaccagattatccacgcatttagactcgcgctgtcggaactccttccgcagcagcttcaaatcatcataaatacctcgccgttcgcgaccagaccgcgttttgcgaatactagcctgtttttcatcaatctctttgcggatatctttcacaatccccccggcatcagaggtctgcgtaagaacttcaagagaatgctcaagaacagaaggaagcagacgagccggatgcccgatgcgcacaacaggaaccttttttggagccagacgttccacaatattatcaaccgacacgttcgacggtccgcacacgagaacgcgcttcttccgctgaaccaattgcagaatcaattcaatgagcgtatgtgtctttcccgtcccgggcgggccatgaatcagagcaatatcccgcgaagccagcgcaaaccgaatagcatccttctgcgagtcattgagcgtgggatcaagaaactccacagttccacacgcctcagtatccagttgtagcggggtcgtatgcccaaacgcaacacgcatgaaatgcgagtaatcagactccgtcatcttctccatcttctccatagtctgcctcatcctatccaggagtcagcaaccaagcaatcccaaaccaatattccaagcaacatacctcctatacgtaacatcgttagcaagcttaatagcccacagcttcttcccccacagctcctcaacagcctcatcatcctccttagacgttgccccaccctgccgcccaaacgcaatccacacagcgcgatcaccagtccgcgtaacaacgccctcaactcccttctccgcatctttgttcttttccttatctttctccttccccaccttcttccccgctcccgcaacatcactaactcgcacaacatccccgacgcgaatcccatgcgacccaagacgaggcgtcccatccgctgcccgtgactcatctgatgcgattgctgggtctggagcgaactcgccgaccacgcggccgccgaggccggttcggcattgtgagaggatgaggcctgttagggcgtagccggttgcttggagggttcggcgggtggaaggggagactgttgcggctgtgctggcgagtttggaggaggagacttcggcggcgtgttcttcgaggaggaggttgagttgggttgaggcgaagagggggattgggattggggatggaggaggcattttgggcgacttgggttgtgtggaggttgtagatgggatctctggagagatactgcgtgctccagttgactggcacggtattttgttggtgtagattgaacttccactatggaggagttgttgagctttcgaggtgcggggataaagaagcttcagtcgcttatgtccgagctcgggatgattttattggctgtgggtttaggagcttcacatgtattctacagcaagagaacaaccacgaccaagagctaatgaacccacgttgttcgtatccaagacagcactactggggtgagaagctgccaaccgtgttaagtccgcattcgattcactaagtatgccaccttggactttcatgttgcctggcaaaatcttagtcatccacgacatgaatagaccgcctgatataccgccttcccagttaatatactgccaggaggtcccgaggttcataaggttgccccactccccaatttccccaactccacaacatacctctctacaatatacagttctttttgcgacttccaaaccacatcccctagcccaagctgatcatggcgctcccttcagaattagcagcgcatctgagccccaactgagtttccactcacagggaagagaaattgaggagacttggtagacgacgtttctatatttcatgacaccaatacctatcaggtttctaaaatcctatgtcaactaccttccaactatctatcacttccaatgtttacaaggcagtctaggggagcacgcaagaactgcatcattcaatctatcaatacacgtgaccaaaatgtcttattgtcctttacaggcactgctctggcctgtaagtttcatcgcctttttggttttgttcactttttttaacctcttcctaacgtatctttagaggagcgcccagtgatgcactattctaaggccgagcgcaataatagcgtaggccaacttgcgaggctggttcgtcgagtacagtcgcatacctgcaatacatattgccaaaggaaaaacaaaaggcatatcaaaagctgccgtgaaagaagaaaaccgggtggccgaattagttcgcctggcgggagaggagggccctcgcaccatcgtcctcatcaaattcatagtggcgggtggcactctcaaaaggaactttcgtggccagctgaagaccctccctgtctgtcggaaaaaagttctagtgctccctcaaagctcccaactttttctacagctgataagacactactacaatcagacgacgcaaaaatattcatgtactccattaacccagtcgctatggttactcgcttagtgctttcgtcagcctaccaatttgggtaggaattcattttcctactcttctgggccgcgcgacataagctttccagatatgttacttcgctatacgggattagctagaatagcgtgctggcccacgatctaattggtggcagcccggcggagatgtccagaatggtcacattgagttaggtgtgcgcggccatcggaagccagtacgtccatgcaagcgaaagaacaccaatagccgaagttgtctagcaaaaaccatcccttgcggaatattggtgtcttgacttgtgatgaacaagcacaacttgatatacgcgttggcacgagtgagttaccatacacgcttctctcaatcgactttttatttactaaattctatagcacttcagttcattttggggttcgatcttgctacgactatcttccgccttttattgttgagtcagatcggagcgaattctggaatgcattaatgaatgatgtgagcgcggagatagttgtgctgccgctttcattgagtggaatttcaccgtcgaacgcgaacgggagtcgtgagtggttctgtggaactatatatacggaatcgagatggcatgccggtgaaccgccaaagtatattaaagacctcgagtttcagtagtcaatttactaacggcgtttaggaaatctccctaatttacccggaatcacaaccggtcaaagattgaactgagtcgccaagaagcatttggcccttgccttttcccgacccaacagttccaaacctccaagcgatatggtgtaccttgtgatgatctaaggggaacgtacctgccactgcaaaaggagcacgtacaaaactggggaacagaacgcacaaatagttttcctttttctttcccctcttgtactcggtatttggaccaaatcgcactcattcatctgaattgatctggcacgtaatatctctgaagaaagacgatctacggatactagcgcttctaagtgcaaaaatgcctactttgctttcggtttcccacttcccaatggcatgacagttctgtgtgaccggactagtgccatattcgatatttgtttcattcacggtcgacaggcgatcgagagagttggaccgccgatgttcaatccacgccctggccgagggaactgcttccacggggctgcgattcatacttcatatccaaattagacgtctcgtcgaatgagctggtcgactacgctacaaatcttctagataatttgtcatcggaccgagaatcctgcaatgcatcttcccgcccgctcatttttggcacccatggctctgggaggctggtctgcaagaaggcgaccctacctactatcgcgagacaatccgtaaacacatatccagggtgtattccgtgctctcaagggtccgatatcgatgggtactcctcacaagggagcttggatggcggattgggccaagatttctgccactacgtttggtttcgtggagtctaccaatatgaagttgctaggtgtcggctatgcgccccgtatcatatgggctgatcataccgatcataggaacatggtcaaatttgtgtcggtggaagagactggtttcaggaggtggaattatcaacgagctagatcggttgacccctgaaactgttgctgtctcatgtcaggccacggacgctcggttagacctcgtggctacaatccttcgcggcctgatgtataacgacagcatgataagactggagaaaggggtttgaggatgtgcagggttcaaagagtggtgaagagtcgccctccaataccattcttaggctagggtggagattgtagtttcagataccagaagagatggggatggcttaattaatagagatggtattttctatgtggctttccctaaggatagccactgtttcttgacatagtaaacctctgtatagaccctttaatcctcccggtaaatcttgtgcaaaatgtctcgtcagcgccgagcaagtgatgttatcttcttccatgagcttcacaaaaagactgccgtttgtaacagactatgaaagttagtcgccggtcgttgagcatccgaatatagaatgccattcaagcaagtctcggaggaggcgccctctagttaagagattggttccttcctcagccccgtcctaggttccagggttggttggggcacagatcctcatttgcctgttggccatcgtgacctgtcattggcgacggcgaagcactgaggattgtgcgtgacagccaccagcggcaacggtggcccaggaatacagcatggctgcccccgtgggcataaccttccaaacaaaggagtcttcgacggttgaatcaaagaaagattagcggtgcctggtccgtgcgccatgtgataattctcattcgaagccacaatttcaaaggctggagtttcttcgacgaaaaatcatatcagaccgttataaaaaaaacgtatgacgccactttctcttatccagaggatgaaatgtagaaaatggaccagtaatccacaagcagacaagtcaatcaaagagcctcgattttgaccttcggctcatcaaccgcgggactgcttttcaccttcttcactgtcggctcaagccctcgaatctcgctcttacaaagtcccaaacccgccagatcacaatccccgcagcgacgtttaacgggcaagcaaaccgtctgcccaagcccaacaagcaacttattgatctcatgccatttctcatgtggcaaccacgactgcagcgccttcctcgtctcctccggcgttttagttttattccaaccccagagattggtaatgcgatgaacatgcacatcgacaccaattcccaagtgtttaccccatgccgcgctcagacagaggtaagccattttgggtcctacgccggggagtgccatgagaccctctggagtcgaggggatatccccgccgtactggtctcgcaggatcagggcggtggctttgatgtattttgttttgttgttgtggaagccgactgtgcggattaattcgtttagtcgcgttgggtccacggctaggatgttggttaggttgagggtgctgtcggtgggctttgaatcctcgttctcttgtttgactttgatgtctagggctggggagctgccatctccgagctcggtgtgaagacgttgcatcgctactgccgtgactgtgtcttttgtctgggatgagagcatcagtgcgatgagggtctggaaccgacgatctcttggcgatgacgcgcgccagtatagctctgagcagcccattgtgtctaccggtgcagttgggttgtttgccctcatttctttcacgatgttgtacatcgtctcccagttggacgggggctcgaccttgactgagccatcttcgtcgcgggtttttcgggcagggagtcgtctttgtttgggtgctggtgttggtttctgatcgggctcatccttcacgatattgtacatcgtctccgaattggacgggggttcgactttgaccgagccatcttcgtcgcgggtctttcgggcagggggtcgtcttgccggtgttggtttctgatcaggctcatccttcactatgaccttttgtagtttgccaggacttgcgctctgtttgaggacgcgtgtggttatgaggctcgcgttgcgcctttggcgcttcgttggtggttcaaggaggtcttcgatgtcggccgtgtcggcctcagagagatcggagagctcggagagggaagattcatcctcacttttgacggcagaccaactcggagtcaccgagacagtttctggttctatcttcacggtcggagtcgcgtttgggttgtaggcgaaacttttcaaagcgctgacattgcagctacgcgtctgtcgtcggatagggggcgagagggcctgcagcaccttcgccgtgtcttttgaagtgcgagaagtgcgcatgtcgatttaacagcagttgaactctaagacagtcaatagccagtcgaaacggttggaaagtaatttcacgtgagtgtcctcggatgatcgatccatgggccggccagaacctccccaacctcggtgcttacagtgccgaccgactttcccaactccgtgggggcgcacttccatacacatctaatttataccgtctaccatattcgacatgcagtctcaggcctctccttttatggcagcaaagcgactctcgaaagagctggagacttatcaggaggagggagagaatgaaatattcctatacctacgtcccgtcgatgaggctgatctactactctgggaagctgtattgaagggcccagttggaacaccgtacgagggtaagttcacgaagtccagatctcgatctccggtcgggtcattccacgccgtcaatctaatgtggcaacaggtggactttggcaccttactattgaagtcccgccgacctaccctaatgcgccgccgaccgtccaattcacgactaaaatcgtgcacccgaatatcaaattcgacacaggcaaggtctgtttgtcgctcttggatgacgattggagtccgcttgggggtcttgcggccgtagtcaaggctgttcagctgctgttgaccgaaccaaatccggattcgccgatgaatgttgagatttcgatactactgcgcgatggggatgtggctggttatgagagtgttgtccggtacttgactgaggagcagcggtgggtggaagatctggctgttggacggtgacgatggtttcttgaaccagacataccctaccgctctgcacattccgatcatctcatctcgtctcggctaccctgcgcctattatacatacgagtccccgaatcctcacattctgagccacggagttcacttttggcattcctaccatcttgcataccttgcatctacctacatacgaatcgacgaatcaacgagtcaataagctaagagtttaataattgagcacaatttttgcatgatcttcaatttcagagcgaagattaagactgaaagtaatcacatgaagactagcgtgtgctatgcgctgtaaatgttggagaccgctgttaaaacccgagaaacaaaaggtcaaatgcggcggaataatgaatgccagccataaacgcccaagaaaataaggagagacaagagcaggggtcgtcacgggtcatgcagagagatagtacaatgacaattgtcatgaagatgcagagccaatgcgatgtgctgaaaaacgccgttcgaaatgataatgcaagttaggcgagaaggcaaagaattgttcatccattagagggccattgcgaccacgacggcgccaccaaccatggcgacgacctcacgagccatgccggtagccatcgcggcggcattggtttgcagaccgggcttgccgacggtggtagtcgaggtcttgtgggcggccgtcggggtgatgactgtgatagaggtgatggtgctcaggctgccatcgggcaaggtgcttgtgctcttgaaggtggacgtgctcaggctggtctgctcggtggtttgcgcagaggtagttgactgattggtggtggacgaggtggatgaggatgagctggacgaggacgaggacgaggtgctcgtggcagtggacaaagtcgaagggatactggtagtcgactgagtggactcggtagtggtagtcgaggacgccgtagtggcagtggtcggctgagcagtggtggaggttgaggctgtggtagaggtttcagtggagaccgatgcagagctggtggagctggtctcactagtagagctggcgctggtctcagtggtctcactggtggagctagccgtggtactggttggctgagcgctggttgttggctcggcgctagacgagctggtctcactggtcgcaatggctgagctggtctcactagtctcgctggtcgcactggctgagctggtcgtactgggtgcactggtcgcgctggtctcactggtcgcactgggcgtacttgtctcagtcgcactggtctcagcagccgaggtggtggcgggctcagaggtggattcggcgctggctgaagtcacagtagacgccggcagcgtggttgcctccgagctagcagtagcattgtcctggcgcttggccagtctcatcaggctggcaatgacgggttcctcaccttgcagagcttcggcggcatgaaggtcagtctggaagattccatgacggaatttggcggagagagcatgcaaggcatcatggagcgaggctgccttgatgtcggcatcctggagagactcacgttgcgaggtcccctgcactaactctgctgcgaagactgcagacagagcgagcagcgtcacaaagagcaattgaagcaagctgatacgcagcatggtgagtagttgaagatcggccgatctactgataaggtggatgggtaagacgaggaagagagggggagaaagagcaaaagaacaaaggtgagattttagggaaagatgagtggaagaaagcaccaagacccatagtggcgattatatcgatttttcgtatctttcttgattttccgtcgcactagtgaagatacacccgagcatcatcggcgtggctgattttttcaccagtcacacatgtcggatcggccccaaacgaacgcttatacagagccgatgtgaactattttggacgttatactatatttgtactatatttgtgcaggccacgactacagcgcaaaagtaaaaagaggccgttctccactataattggccgggtctcagccctttagggggctaacaatagcaaccgtggaaacaagaatagaagtgttgtcatgcaatatttcctttttactccattgggagatttgagcggcaaaaggggtatgtatttcccctggagctctgattcgagcgtcattagtataatatcaacttgagtcagaacaccctgaactagttcctaactgtacgaataacaatatcggaatcccgtcggatccataacctccccgaccgatcgagaccgatcaagaacaccgaactccatctccatatcaagcgtaacaagcggcgcgtccggcggattcagaattcggttcgtaccgttgagtgcgaaccgatgcccctcgtccttcgcctgccagatactccacgtccgatcgatcatactgtggtgcagcataaaagccgggtcttgtggagacgtgaacagatcttgcagggtggccccgaggctgaaatgcccgccgccgtgcacgcccagcaccccgcccggccgtgcgggccagtagtccatgacggtctggaaatcggaaatattgggcgcggccaggagtcggtcgacgatggtctcgttgtcgtagttgctgctgacgaaattgttcagacttcggttgaaacagtgcgggttgtaatcgaagcctggcgcgggaagtttggttaatgagacgatgttgcggtcgaatgggcccatgtgcacgatcatgtctttgaagggtccgcatcgcacgcagccaccgcccgatcctcggggtatggttattgagccgccggaaaggttttgttcgtcgggattgtgttccccgtcgcccgagagggagctgtcgctgcagtcgaagagcgggctggccttgaggttttccgaccataatggccaattccagtacctggttcgtgttattacaatttggggtcataatgaatgaatgacacttacggcagatatccagagtacccacactcgtctcgcagggctttctcccagagccagaggaagtgacggtgccacgggaggaacagaccactcagatggacattgagtgtgtaattgatatgggtgcttatggtatattagtactcggtctctagcatcgatgaagctggaacctacgccacaaaatcatcgaatcggttccgcacgcctgggtactcctctcttggaagatgctggggcttcccttgcaaacacaataccgcattggtatagtcgatccgctcagctcgctccaactctcccctatgtaatatcagtctcaattggccctgaaaacaccagaaaacacaaaccattccttccgctcagcaatattctgacttccacacaattgctccggcagggagatgtcgatatcgataccgaacagggaggactccgccgaaaccaaagtccccaagacaatgaccaagaaagacggatagaaaccaatcatcctgtcaatcccacaaaaatcccgatctgcgtttaaaattgtcgcaggatctccctgcccggtccatgaacaacactatttataagtaaccccccactatcgagccaataaatcctgctcgtaccccttgtatgatctgtaagtagatggaatatttaagattagcctctttcaatgaactgcaaaaatacttggctatgcggttccaggcctgtcagtgttgtgagctgtcactcggggccaatgtgcctacatcatacatgccccataagtggcgatgcacatcttcccctgcatgaaatgaagcgataggggctctagtcgttcactgcagaccctccccaaaacctagccagctcgctccaagccaattatcttacttgtttatgagatgctttatcgtcagatctatgttgtacctaggcgaactgtcagaatttggtgtgcatacttggcccccgtattctagcggtggggaagagagtgttctagtcggattttaaattagctgcgtttgttgttacgtgctggattatttctaacagaagaagtgcattgtttaacgaaataacaggtatagagaggaatggaaaggaaaggaatcgacagggccgtaagggagtttgtggggtccttctaagtaaacgatataaaactcgaacgctcgcttacattcccttacgcatcgggaaggtaggtttgtccactggacgtactagatatgacctactagacgctagatcgtggtataacccccgggcaaaagtatatttagtccctgaatgctagcttctcgttatccatatagtcgtctaattgtaagacccttaggtgcagttgcctaagtatacttagggataatggtggatcgggaaatagagatagaatatagggtggttgtatgtgaactaatagctgcctctccagagaagcagcctatggggataataccgcaccgacggaatcaactccaaagtatctatacggacgaccaagttgattggaaatcaacttggctcaaataacaactcatttcatacctctgaattacaaccggtctgtcgggcgaatcgccattccgaaattggtcagaatccaactggcgcctccctaacatcagtagtccgtggacccgtttcactaaacgaaaaccaaagccttgttgtggaaaaggttatgtgtgacatccttggctgtactagtaatcctcatgactcttctatgtggaaacagggtctgttttatgtaggtgaatgtggggtgggaaaaggccatatcattagagcgattatcgcagcgacggtcctggttcaccgcaaggaataagtcatccttatggcgcccacatgagcagtttctgatgccattgatggtagcacgtatcatgcctcactcggaattttgctcaaccgatacagacgtgatggggttagtccccgagttcgcagactatgggctcggaagacagtcatgatcacagacgtgatcagcatggtcgacctggccgcattgtctacacactgcaagactgttcgatccctggctagatcatcaaccgatcttgttgcaggactgccctgggatcgattttacggggtgatctacgatgagcagatgcgccaggaccaggacgtatcatacagagatttgctacggaggtccggtacgctgacgtgcgacgacttggcaacgcccaattccaaggccatttcttcgctctccgatccacaattccaaacatcaccggccatcgtcaaattgaattcgttgcggcatgtcatataaacgtcagaaaatcttcgtttttccagccctccacactcgaacaaaatcctcaggcccgaccgcccttcatctgcgagctgatgacttgcttggtttgcttaaggcgctaaggtcccatttcctgggtctattatatacactgcttccatgcctgatgttgatgtgccaaaagcggattggccggttcataagggaaaggtgggggatgtttgatgccaatatgacttatattgaatacaactggctaccaagttatcttgtgggctggtctttcactagagtccactctactggcctccgtcgctatacaccacattatctcgcggatttcttgaacctcttctcgatttttaccggtctcttaaatattcggtggcaataagacagctctagatttgaaagcctgccatttgcggctcattgcagcttttaccgatgatgtaatagctatcatcgtttcaagtaagtgatgaaccaatcttagccatgcaatggtagcgacacccactccaataatctggggatctgggaatctggggaaacatccatggctaagcaatctcgcatgttcggaaatgggttttatcctatacgaagtataatattgaacaccgttctcacaattgaatccatcacgatggaatgttccagccgcatcatcatgtcatatattgtgttcctccatacttctctcaaatcaagagaaaaaccaaagtaattctaccaaggaataccataggtagcgcgatgtcacgagcgaaaaaattgaatatatattcgtcaatccatcttctagccgtcctcgataggaattgagtaaaattgaacatctcccatcaattacacttcaaaaaatgttcttccaaagatcctcactacttgcgttcatttcactgcatctgggcttcattccaaggaccgccggtcaagtgcaggccaattgcctaagtcaacagatcttgaataatgatttgaataattgtatatgtgcggggggcaacaatgaatgccagaaacagtgtccagttggacctgttgcgccagttatgccagctccaaactgtgggagccatctactcggacacctgcacttggatgactgtgaacaccattgcttgacagaatcaaatgacttctgtaaatcctgttggatctggaacctacctctctgtctttgcttgcagaatggtggatgtctgcaaagctccaaaaacgcaccttactgggtcaaaatcacctcgacactagcgaccacgaatttagcaatcccggacattttgaacctgcaagaaaatcacaaactcctggctggatacgggtgggattttgggcaggagacggcatccgacccaaaaaccgagtcgctagttatcaactcagcctactcgatcacggagaatcaaattcacatgcacgtttgtaacattaataccaagatgcgcgactggttggctaccctctatcaatcctccccttcagcctatcaaacactggttgaaattccaccaccatatcctgctggagagaaaatgttctgccgcgcgtcgcaaaccgctgatcagactatcccgggggattcgatctccgatgatatcaactcagtcattcagcagcagcctgtttgcaagtactttgtgggtgcggccgtgatcagagattcgaagcactatacctgggtatgtgtgacggccgatcatcttagtgcggaatatggaagattctgtgcctgattttgctggaggcatctgtcaattgtcggagtatacggaccgacataccggaggattgtaatttagtttatgtagttaatcatggccccgtataaattgtgctaggcggccaatacagatatttttacacatacagcccagctgacagttatgagcccggttcgcactggacgagactagtattgattggtgtagtatctagcaccagctagaagtatctcgcgaagccgcaagccatacgaagctatatatatagctacccctatcgtctagtaatagactcggtatcgatcctctccgccataaaggaaaaactgaaggacgtacctcaatagcgtatctagttcgctaaagtataattgtatgtaacgcagaagaacgtctaggagctatgcaacctagacaccccgtcaatagatatcaaccacttcactttagcgaagaaactccggctttgttctagatagttgaggatttttgtgggtgacctggatatcttggggtcattgagggaactcgattgcgtattttcatattgggtttcgacgactgagtatgaaactctatgccaagcttgggttgatctcttgttttatagtgttgggtcgctcttgccttcccggctttatagctccttcctctctcagtctctcactctgcttttttgttttgtgtcgtgaaaccttgtcgtgtgcccttgatctaggtagtctagtatgtgagcgtgcgttatagataagccagctttaagcttttctttagacatgggatagagtagaaccactgcgaggaaaatggtctgcggaaccaacgaggaagatacatggagagcgtcatgaatacatatttaatattgacccaggtcctgcgaattcttgggcgaagcccttatgcacaaaacactaccatatgcacaaaacactaccatgatgctccgaaggctttttggaacaggtcataccccaagccatagcttcctgggctcacatcattgccaagtatcgcctcggaaaattgagtttgtgggtagacttcttgcttaggtcctgcccttctggctcttttcttacagccactgaatcctgcatatacccattctctacatcccatccataagaaacatcagttcccattgtgctggctattcagttcgcccatcaattgagcactctaatacattgcctatctctctgccgccgaagttggtatgaagccacttgtgactttctgtgtgttcttggcttatgagcttgtgaatacagcgacggttcacagtgggtatgatttcttttgccgcaaggctgatcttggacgcgtcgcctgtgtcaagctctgttattattgggtcgggtagaaatgaatctggggatctcaaggccaatggtgaaccgtggatttgtcttgtgtacggggttgtggtcttgcgatggcccgagggatgttccatggttgttgcagcttggcaaggcggtgaacggggacagaataattacggtcgcagattctctcagctagcgagtttcaggtccaacccacttgaaatattctagaagctcacccttacgcaactgggaggtatggcgtcgggtctgggttgagtgttgacagctgaaaatggcaagaataccgaattaatgagacgatctgagctaaatatggccatatactcctgagatttgtcgtgatttgtcgatctggttgaggtcatgttagtacaatacacgatgtacagaaacaaggtgatgcgttgtacagggtaagagaaatagcatgtcatttgatatacggaatacgagtctggcattgttcaagcgagtgtctcaggtctatgtatagactgtttgaggcgagtggtcataccttggcttggtggcgtcgagacagacggttttagcgagtaaacaagtaaacagtcggattaatttgtgattggagtattctagaatccgagcgcgtttgatgttgacccctatgtagtttgacccccttagacccttttaatgacaatagcgttggaccccagacccctgaagagatcgacttgcctagatggagatgcgtcatgccaagctagggttatccaccaggatatatagtcggggtactactagtgagggtatgttgtgtaaatgggtatacgcgtctatataggagcattgataaatatagtcatacatacatgccagttcattgtctataatgttgtactcgtaagttggataggacctgacgatccaagaaacaaataaatagataatataaatgaaatatatcgaattggccaatcaaagccatgaatcgagggtcatccccactgttaatccaccgtcgacccttgctgatcggaacaaaacagcgaggatgtgcataggaccttggcatagcacagcccacgggtcttggcccaaaaccctttatcccttgctcttgctgtcttctcttctccttcctttcagatttcgtttctcagtctgtcattcactctcttttaatccgagcgcatctttctcccactctcgtttatccaatcgctcttttatttattctcacattatgaagtccacagtagcttccatggccacggccatcaccttgggtgcctcgaccgtccttggtgccgcaaccaacctccaggcccgtagcagtgatatcactccgatcactgtcaagggtaacgccttcttcaaaggcagcgaccggttctacatgcgcggtgtcgactaccagcccggtggttcttccaacctgaccgatcctatcgctgatgccgatgggtgcaagcgtgacatcaagtacttcaaggaattgggcctgaacactatccgtgtctactccgtcgataactctcaggaccacgacgagtgcatgactgccctcgctgatgccggcatctacctcgttctcgatgtcaacacccccaagtactccatcaaccgtgccgagcctgagatgtcctacaacgatgtctatcttcagtacatcttcgccaccatcgagatgttcgccaagtacgacaacaccttggccttcttctctggtaacgaggtcatcaacgacggtccctcctccaaggctgctccctacgtcaaggctgtcacccgtgatatgcgcacttacctccgctctcgcaagctccgctccgtccctgtcggatactccgccgccgatgtcgacaccaaccgtctcgagatggccgagtacatgaactgcggtaccgatgacgagcgcagtgacttcttcgccttcaacgactactcctggtgtgacccctcttccttcaccacctccggctgggaccagaaggtgaagaacttcactggctacggacttcccctcttcctttccgagtacggctgcaacatcaacacccgcaagttcgaggaggtcaagtctctctactccaccgagatgactccggtctactctggcggtctggtctacgagtacaccgaggcgggcaacaagtacggcttggttactgtctctggtgactccgttactaccaactccgattacaaggctctcaagactgccttcgatggcaccaagaaccccactggcaacggcggctacaactccaccggtggtgcctccggttgccctaagatgcagaagcctaactgggacgtcgacactgatgctctccctgccatgccctcccctgccaagaagtacctgaccgcaggtgccggcaagggcgatggattcgccggcaagggcagccagaactccggcaccaagtccaccaccactgccacccagggctccggtgacgtcgctgctgccactagcggttccactacttctgctactagcaccagctccactggtgctgcccccagcctcaagcctttccagttcagcttcgcccccgctaccgtcggcctagtcactgtcgtgtcggctgtctttggcgctagcttcatccttctgtaatgctcctacctttatgaaggggcttcatacttttttcgattctccctgacttgtatcttttttaactggctttcatcttttaccccgtgatgatcatcgcttgggcttggcaaattggaggacggcgggttgctttccagttggtttattcagcccttggtatctagtgttcaatgaaacagagcttaactgctcatatattatcttgctagtaactgcgctagcaggaaatctcactaaaccgtaattccaatcaaacaccctcagcaagagcttgtctccgcgacttcgacagtggatcaaaatacgggatctctccaagcgaaacgacccgattaccctggcgcttcccattgtagtcactgtcctgtattagcatttcaactctgaccatataaaccaaagcagaaatagtcctactcacttggtagcagtatgataaaccgaccgactaaacacaccaacgtcagcatatcacccatcttcttcatgaagtaaatatcatacttatcccaaatagcaagatcattcctcccccatctaaaccgaacctgcaaatcatgattctcaaacagaagccggttgactatatatcccaacgacacatattagcgaagtatccctcagcctgtatctagtcgaacttacacaatttcttcaagagctcgctctcgagctgcgtcacaccctcaatccagccatgctcgacctgctgtcccgcgccgaaaagactcttccagcctgtaaccgggttcgttcggatgagggggctgtttgtgttcaatgagttagtttttgcatgatcagtcttgggtgacggtcagaagataggcgagtagtgtcttactgcgtcgctttgaaatcaaaccctgtattctccggtgcgcctctatcaccttcgattaggtctatgctgtgttctttggcgattttgttgaatgcaggctgttttgttatcagtacatatacttaattgttgcacattttatccggtgaatgcagcgagtgagtgagtgcgggttacttggttacgtacctggtaatgcacgaccttcaactcttccgctaacttctggatacttggcgagagtcgatcgtacagctcataccccgatgcccagagggtatcgccgccggactggtcttcggggaggtctgttatctttagcagagcgtagtcggatgggactcgttcgaatgttatgcttggatgatttttagcttatttccgcgttatgggtttgggttcagcactgcgttcagcactggggagtgagtaggagggaagcatactctgcgtgccatccttggcttgcgaggcggccgttcagtggcttgtatctgtcgccgtatagtttgcggttgacctacggctgtcagatatagtgctttatgctgctaggtattcggaggggaagttacctcggaagaaatgacggaaatctcatcgtccaggtgaccattctcgtcgactgcgattcctcgcttgctatttgcgacggcgtggcggtggagctgtacataagcatatgtttttcaatagttgactagatctattgcgtgggatctgctcacctttgatgtactcggcttcccagttaactcgcccagcttctgaccgagaaccttttgctcctcggaggagatatcctggtcgcggaagaacacaacgccccgttcggagactatgtggtgttagtgtttggttcatttggtggatctttgttcagtataaaatatactataatagactcaccaaggatagccaaatcccggatcttcgcctcgtctttcagaatatcggtgagttgcacacgtgggaactcagtcccgataatgggtgtcgtgttgaagttctcgtactcatttaagcttcctgatgacttgagtggtgagcgaagaatactgggttgcggggtatcggtggccttggctttgatatctagatcctcggcgtggtcttgggtagtgattgctggcgacattgtgatgcgtgtgagtggtatatcgtgtattgatccaaaatgaattacgtcgtctattgttgaggagtattatgtgcggtttgacaagtatatctctcctcgtaagtcgtaagaaggttcgtctatgccgggctgtgatcttgcaccatcgcctctaaagtttcatcttcgaggcacggattggcctgtcttgtgatgacgacacagtgcttacagtttggacattgttttggtgggatggtgtcatctctatctcatgaagttggtcaattgagggttctccgtgtacatgtagcaatctgtgccgtatatggcgtataagagggtgatgaggagtaccaattgcaaaatcaggatttcatcgtataattactattgataggcttaacaatacgagttgttctgcgaattcggaggttacagacacatcgatagtccatattttgttctataaaaatataaataccgctctagctaagatattacctgtacaaactcgttgtatattcaatgcaatgcttagtcgaatgaataaacaaagcaaggatctgtgtaagtcaaggagtcattagggaatccatcagcccaacccaccgaaatcaagctgcttatgcagccgaggcaggaggagcaccagccggaacaatcggctcaatatcaaaccgcatatgcaggtcacgtctcaaaaaccaagtatggattctagtaatccgatgcgtacctataggccaagcccctagaacaagacaagccaccgccttgcccagctgcgttcccaggatctgctggacttcaggagtattcatatcccaagcatggattgttggtgtcataccccttgtctcaggaccgggaagaccgttatttgggtagagcaccttccccactaagggaagggtctcatcattctcaacttccaccatgaaaacataccggagagtatcaatcgcggcgtcctgtttgtataaagctagcgcaacatcagaccatcgtggtccccactccattctaaaaatcgaggtggcaatgatagcacccttgacgatgcaatggtcgtaagaggacacatggtgtacttgttcatttctcgcattgcgctgtagagatgattggcggtatttcttcaatctcggattatttggaaggtaggtggatttaagactctctctgatctcgaccggtgggacaacgaacgaggattcccatacactgaataatggctcgtccgggggattggcttcgactagatcggcgacggttagtgtagactgggtcactgggcatgctgggccagctgggttggtgttggccatccaggcttcatattgagcacccgttgttcgatacttgtcgattttcgccatttcgggcgttggttgtaatatgtagatttggtctgggtttatattcgcggaaatattacccatgtacatgctaatattcccgggacttgtaggtaactcaggaaggcctgccctgagatcttgctcggcggtgttcactggtaacggattaagatgtgtcgatatgccctgtgattccctggtctttagcttggatcgaacttgtgcgagttttgattgcataggggagctacgttcggccggagccagtctgtcattatcgccgtcgtcaccgtcgtcgtcacgtttccgctttttgtcctcagaggtgtcggcttcagtagacgcggtggcacccgctccaccttctggtactggcggtggtgcttcatcatcatttccaccgtcggtgttattacgacggaagaaattagcgactttcttgaatggcgaagagtgaaattcggacatcgtgttgaaaatgtcaaaatcagaaggatttggaagtcttcgggtttctgatcttgttagccaggagctgatatgcttgactggcttagctagatgctggactaagcaggtattatatagttcgaaacaaaaggtcattctaagagatgtcgagtcagtgtttacatccagtctatgttaagatgaaacagacggaacaatgaaaaagatctggagacaagaaggcttacacaagtgacttgataaagaacaaagagagccgagacagagcatgtgaatcaaatagatgggatatgaagtcctcgagtgtaagcgtatgatgcaatgagaatcacattatgcaaacaaagcagtgtctggtatgctaaatttagcttgaagccacgagtccttcaacgtgaaagaactcgatccgccaagttcaagtcctgaaatgaacatgttgagagtgatttcaatctcccaggaagcataaaacgtcacgaactcgcatgtatagattcatgataatatccaaaagtagatcagttgatggaggtattgagaaaatgaaagtccaaaagaattgactgatatctcgttagccctgaaggacttcacgtagtcacacatacaattaactgttagcaccccatcctgcagaaaatctccaatcccgcccagcctctccgatccctctcaccagacctacaacattatcaacaaacccagcttcaccgcgattgaccctctcccgacgctcggtctcggtatccgaactcgcagcacgaagattaatcagctgctgcgtactatatccctgcaagcgatccgcatccatcctcgttaaaatactaccgtccccacgccgctgggtccacgccgcctgcttaacagctggggcccagtactccgccagggtagattcatcgcgaccaaacgcgtagcacttggccagcggagagtcagaatcctctggtataagcgacgcattccagcgcgtgtggacgacttcatatctcttctccatgaagaagataaccggccaggtaataatccagagctggagaagcacgacaacccaccagacgaaacggtttgtgcggaggcggttgatccagtgcggggagtatattgtgacggagcgtcggctgatggagagaccgaagcttagggagccgcggtagttgagttcacggatgtgggaggagaggacgttctgcatggcgttggagtcgaagccggagacttcgcggtgcagtgtgaatctgtatagggaatcgagattagcagtgtattttgtgcgagtaggagcagagcatacgatttcacagaagcggggtcactgcagaagcgctcgcaccacatctgtaggtttctcgcatctggagagctgttgttctgctcgtcggcgttatctcggcctaggagggcatcgctgtccccggtgagactgatagcggcacgcgacttgggcggcttgtacgtgcgcgagcgcaggattcctccccgatacgccggtctgagatcctcatcgctgaggacttccacttctctccagtttgtgaccatgtatccgccctcccacccggtcagcatggtctcggccagatccagtctgaactggaagtctgtgactgtgttgcttttctctttcttttggtcattgctcgtttcggtgtgggtgccatggatggagagtagcggccgtggtggcagctttatttgtagacggaggacattgtacaactcatcgctgttgctcgagagcgctggttcgaggctgagcgagtccttgccgccggggagataataggccgagtcgattagccggagcggtcggatgctttggggaggctgtacaggctgtacaggttgaaaatgttggacaggctggaccggggcgacaatgagttcggggtcatcggtatacggaggcggcgcgtcgtcgtccagagaatggagtgagtgcgacgatgacgcgtgttgaagacgacccatcacttcggtatttagagcgaagtaatcaaattaatgaaaatgatcaaagggaaaaatattttagagagaaaagaaagtaaaattgagaaagagaggggttttcaatgttagaggctctaagacctcgtattacacagcccagcaccagttgactgcctattctatttataccacctttcacctttcacttcatccaacataacacttgaaagatacaaatttcgggtccatctgttggcgatcatggcacaaaccaggacccctccagccataagtttgggaaatgtcgctgacaagatcgcacgtcggattaggagagacggtacagagaccattcgacatacgccatgatttgggactattcagagcatcgctgtgacagtcccgccactcccatttaccgttttgtagagtccaccagcgacatgaaacggctgtgttgttgaccacggtcgctaagttgctcgccgcgcggaacttcatgcagtcactatcctccaatttcttgttgtgaccttggaccaacacgtagctgccagtgcaaccaatcccatcgaacatcttcagtgaccatccgttggatacggtgacgataccattcacggtttgtgtggagacaggaacggttgtggttgtggaagtcttagttgtggaggttttggttcttgtagacttagtagacgtagccttggtagtacttgagcttgtggcggctatagaatcccgcatcttgctcgccacaatactgagctcattggctaccatatagagaccagcagtgccagtaacagtgacaacagaagccctagtagtagtgctagtaggagcggcagctgacatggatgtggtctcatgtagatatgtcaagggtacatctaccaagggtatatctgtcgtgaaaaaatatggatccttgttggaagttgtcgaggatacatctttaactgtcaatgatagagctttggtcgcaggtgcagctttagtctcagatgattttgacgtagctttagttgtagatgttttcacggatgtagcttcagttgcggatttagttttggttgtagttttcactgtagtcttcactgatgctgctttagcttcagatgtagttgatatggctttagttgcaggcacaggtggtaaggcagccgcagataccgatgagacacagaagtctgcaccggtaccacatttaccccttgtagaacactatagatatagtcagtctaggctgcgagatcaaatccgatattggtaaagctcacacattgacccgcaggacatggattcaaatagggaatgtcggtccacaacaacggacgttctgttccgggcacttggggaccacagactgcatcaccaattgcaactggcattgggggctcgccgtcgctgagacaaatctggcctccctgctgcagattattgcatccgtaccatgccgaggtatgggtgttccaagtctcgatattggcagtggtgatactgtacccctcggcaatcttcgcgcaggtatcgccagtgcggatagtataaacgtagcagtaagaaccactgttcggtggaaagagagtttctccgtccccacagcatacgggtttcccgtgagacaaagaggggcaaacagtagtcgggttgaaggaagtgaatgatgctaccgagatactacacttggcagccagattgtcgcatgtatctccagtttcgacaagaatagagcgacatgtgtagggatagtaaatggaccggtcttggatcactttgtactatcttgggttagaatctggggtacaggatgtggagttgaagaagtaggcactaacctcgggtacagctacagacaacgcaactatttcatgaatcagaagaagactgcatagagcgagaaagatccctttttgaaaataccccatcttgtgtagacttgcctgagaggacgactctgaggaacacatcgcgcagctatatatatatctataaagaactacaccacaaatgtcacgcctgaaagcaacatcgcggaggtaacgtgcattgatgcagccagtgaataatatgaaacacagatatgcttcatacagtaaggcgcaggggccaagagtccccgaagggccacttgaaatcactcattctggaggacaccatgttgaattgttgtaaagaacaatctaaagtgcctcctccgccaccgtcaacaaagaaggtcgttgcatccgatgagcccccggtaaaaatgtgacctcaaatagcctttgttcaaatccttctctttcctcttcggagtttggatagcagattctctttgaagaagcgatataacttaccatactgccaagagtcttggctaccagggtaatagatgcatcaaaaccaccagtttgtgggagttaatgacaacaaaacaaaggaaagactaaaagagagacagatagatgttacgacactttatatctcctttctcaatcagcctcaattctttttgctgtgggacaaaccatcaaaacgatagcgctcatccctgggaccagttcaacgccgtatatatattggatgaacatggttattagcgaggattcaaaagctgagtgccattatagtgcgtgtgaccgagtcatagaacgaatatccaggggttggaataacaagactggctaagggcttatcgtctttgtgccactcgtctttgtgccacaattcaagggttagggacagggtttcagaaatagcttcttagaattgagacatcctaactgggtagcattggaaatctggagatacccaagatggcgttttgggagtgatatagatattctccagagctattcctcattcaaaggctaactcttgacacgcccatacatcgacgtgcgaccagcagagatgggagtatatggctaggagcaaatctagacttccagatacagcatgtttgtcttagggtgacggaagtgagctcaactaaatattgcttgaagcccaaaaggacctcggcggttgatgcatatggatcctctaagataattctatctgtattcagacttgattccttttatagactcttgttagcttctttcttttaaatacctcttagccatcgagaaaatatgcactctctaggcgtggtttatataaaactcctaagcaataaatacttagagagacatgtacggcttagtgatgaattcaggtatgctctgatgtattgaatgtcttcatgcagtttggcaaacctctctttgcttgctgttttggcacctaagagctttgtgtctttgtactcacgaagctattaagaaagctcatggcagtgtctagatgatcatcaacattttatctcacatcattctctcctcttcagaaatgtagacagtatacgtgcatcacgtagaaaatgtatgtttaggaacagttgaatacacctggattgcagcgtctgacctatagcgcttcaaccaaacagatatctgcttcatgaacacactactcgatgcatccgagattgagcacactgatactgtagccccatgccctaagacaagctctagaagtgcaattatcagagcattcttattgaagcaaagtgccttgagcttcgacgacatcataggtatacacctaggcatataacctcattcctcgttttgttaatcatcgcgttaaacgtttaacgcgtttggttcctacttattttgatttcttttttcccctgcacctctccttgttcaatcttcacgtatctatttcccagctttgtatcattcatcctctgcttcatcaccacaatggcttctagccagaatgtcgctaacctggatgtcgctcacccggacgtcgctcagccagaagtcgctcatctaggcgtcgctcagcaggatgtagcgcacgaggacatctctcaccaggacgtcgctaagcatgtcgctcaccagagtgttgctcgccaggatgcctctgcctttaatcaggctccttttaaccaggctgcgtggcttactgccaaatcaggctgtcccctcaagatcggcatcgcgccattcacacctccgtctgcccatcaaatcgttgtcaagaatggtgctgtggctgtcaataccgttgaatggaccaagaagttgatgggcaacatgttgtccccctgggtcaagtacccgtttgtactcggaaatgattgcgctggtgaagttgtgcaggtcggtgacatggtcagtcgcatcaaggttggtgatcgggttcttgcccacgccctctccatggatccagctgtcaacaaatcttctgaaggtgcttttcaaatctacactgtgatccgtgacaatatggtcacagtgattcccgattggctctcttatgaagaggcttgtgtcattcccctcggtctgtcaactgctgcgaccgctttgtttcaccgagacttcctatctctcaatctccctggtactcccccgggcactggcccagaatggcttcccgaagtggtcctggtctggggtggatcggccagcgtcggttgcagcgccatccagctcgccgccgcggctggttacgaggttatcgccacttgctctcccaaaaactttgaatatgtcagtaatcttggcgcatgtgcggtctttgattatcgtgacaaggccaccatccagcaaatcgttgagcttctcgagaacaagaaagttgtcggcgccatcgctgttggggacgactcaactgatgcttgcattgaagtcctcgcgaagacaaacggctcgaagttcgtcgcccgggcctgcttcccgcccccgaaaagaattataagcacaaccttccagctattgcgtgccgtggcagcctcggttcggtcgaacatcaagaccttcatcaaggcgaaacgcagtggtgtgaaaaccaagttcatctccggtacctctgcggctcataacgaggttggtgctatggtttatgaccacttcctccctggagctcttgccactggggtttttgttgctgctcccaagccgcgcattgtggggaaggggttgagccaaattcagcttgctatggattgccacatgaggggtgaggcagctcagaaggccgttgtctcgctttgaatttgtcgcgagccaatttcgggtgttgttcttgtttgctctcgcctgaaagggcactgcaggacctaggagactaggtattcaatagttgatgaaatcccaattcaatctaaacacaaagtgagtaaacttaaagatcaaggtcatatttgtagtgagaggaatatattctcaggagtacccgccttctgatcgatatgtaatatgaatggtacttgattcaaggacaccgcctacttgaatactacaatattacatctgtacgcatacaagattgaagaagataattgaaaacagaagtatccaaacgcctgcgagctctcgatatggcgagctaaaaaagattcatgtccaagaagaaaggtggctccggctggcctgtgacttcagacatagtacacccttgaacagtcgacaggttgcacaatttgtgaaacgagtcatagtccgagtcgagcagctccaagtaggtcgtagctaaattattcccaccctgcaaaactcgcaaagctttcttcaaatcctccaacttctgctgtttatcctccgacgcggagacacatgtactcggtcgatcggcatgtgtcttgaggaactttgccgagagatatagtagcatgggagaaaacgcatgcgcctgtacaaccttgtcagacacgaaagccactgtcaattcacggggagcaaagggagtggtctcactttgaaaaagctggatcgggtgagcggcttcgccaaacctactatctcatacgcggagtagagaggaaccaggatgatctcatcatcaatttccaccggcagggcctctattatattgtagaaccatatcacggcggcattggcgagcatatttgtgaagaggcgcatggggtcgtggagttcgggcgaggacgggggtagtgaaatcagcatcagccgctgctgtaccatttggtatagtcgagtatggtgtttccagctatctccatggcttggagacgtcttatcaccgtgcgcggctcgctggaatgcaacgctgtgccagcatagtgtgatcaggacgattgtctccgcgaaaggcggtagcattttgtgtccggaggcctcgatctcgtcatataaggagtccataatgactggcctgctgtgctggaagtctgactccgagacggggagatatatgcatagctggagatgttagtgtcactcagagcattctgtaaaaaggagtaattgctcactgcttcgtcatttagacttagaggccactcgtcagagatattgaggaaacggtcgagacaatatgctagccagtaggtccgtcgcttttcctcggcctcggcccaggcttcggggtgtgccatgtttatgctaatgttattgagacgatcaatctcgtgcaattttgcaagttggataatgcgaaaggcacgtcctgcagtaagccaggctcgacgatagctcatatagcgaaactcatagtgggtcagaagaagccatgcttgggctgcctgaagacaggccgcaccgctagattcaatatcgtgatcaagggtctcaataccggaccgcgcacggctgtagagagactctcgcatgtgctgtaaatgggcagatgacgcagctgcaagtgcccacattgcaaattgcaagcagatgtgagaagctggtttgttgaatctctgtgaccaggagaagtaccggccctggtggagcattggcgcgacagggtgtactctgtcgaaatatagttgatcccttcactagctgttagaaatatccggacttgaagggtaagctttgcgtacagatctgcctcgattatatctgagctctcatggtcaggtggggtcattggtgtaataggtgaggttattgtcgatgtctcaatggagtagataatgtcacgacattcgtcttttgtggcattggggatatagtcctggggtgggctgagcatttgaattgtctcgtcggagtgatatttctcactgccatccaatacttcgttgggacagagattgccctgatcacaatttatgatgctttccagtgtagctaacgataaattagcagggaaggtgtataggtcacatttcaacacaccaatgcgattgcgcaaggccttcaaatgtcccttcttggggccccgtggggagcgaacctgattcacaaggcaggccgtaccagaatcctcgcactggtcacattgaggccgtcgtctattgcatcgaagtttctttttgcggcattcctcacaagcctaagttgtcagcgccaagagtcaccttatgagctaagtggctattgtctcaccagtccaggctgctgtcgtgagcctgacatattgaggagctgaatagagtgttgatgttctgatgttctgatactactgcgcctccagtaagaataagactacccgagtcaataacacaagtatatgtagtggatatttataactgtcaactaagactattgagtgcactccagcctgagtcgctcaagcgtcggcaattatagattaactatttgtttcgccagataccctcccctgtagaaagcttctttcacgatcttccaaatttggcaacttgtacttgtcgaaagtctactcctcttccccgatgaagtccgaagagaactcctacgtatggtgtgatcagcgctacatccgaaatggccccatactcatgacctcacgtctttcagctaatcaagatagtgcctgtcaagggtaaatggctaatgatctagatagctttgaataaacttccgtgcctgcgctgggtgcagcgttagtatttttatcacgccgcttgggtagcatagataagctggatggtggtagtaagtatcaaccagttaaccatgtttgtcgattgttgatcagaggttgaatgatctgtcatcctggtgttaggtctgttagccgaatcggttagttgctcaagattgaggttcggattgttaatctagtgtggcaggttgtgtggatatgccacgccgactggctgttacatatctcaaccgcggcacatgcagcacgtggacaatgatttggaattgataattcaaatcacgcctactacgcaacaagctggactagaggtaaagctggttctcggcctatttgagccaagagagtgtagcacgaaacagttgtgaaatgtacggggcattgattgtgtcattggctcgttcagaatatcttcttcaatctctgacgcaaaggtagtatggtatctagagtgtttggcggtttggatgtatctttcatggttgagataaggtcttggatgcaggtttccgtaataatctcattgactattggacagatataaagatcaattgacatgatgagaatctcggcccatgactgcctaagcgtatcagaaaatggcttgggttacagctagatcaggtagggctgaatatccggaaatctcacatcttgatctgctcctccgcgacgtgataacttgaacctgatcgaaagggtctcttgcagcaattctgatggaacctagtacttttccctcgcggctatggaaatagattgttgcgaccgagaacgtcaacacaccgtaacttcaagaaaaaagcttggatgtgacttaacctggtcgagtgatcatggtagcaataaatagatgcgcatggtacgcctttgccccacattataagttaactctctctcttattggtgaatattcccctgtgagagccacgcgaggctatcgcatacaccggggctacactaaccaaatacggtaggtacagcgtagatatactatcatctcattgtaatagttgattgctaattgatttctaaactaccatttgctcgggggaattaagcacaaaggcaatcaagccaagggttgtggcagcatccgctatctggacctgcgtcatcctactgccacctctaggactacgcggggcttatctcgtgcacttcagctcgttccggcacctattcacggcagtagatattgtgagattctagtgttgataggttctctatcgcctcgggccgaaaaggggttgtacgtatttggaattgttaaacggttatagtccttgaaccccatgtgacctgcggcgcgcggctctgctccccattgtgtacctcggcagtgatatggtgcttactcatcggtcattgttggaatctcgactagccagattcggtttctgcaggatctgtcgatatgcaatgtcgcagtagggtgtggctcggccaccccgttgcagcctcgagttcgggctaacggaatgtcccaggcggaacagaattgcattagatctcacaaattctaggcgtaaaatgcttcgtagcacgtgtgcctcgaaacccacgaacgaacacagtcatatcacgcttgatccagacggcaatagattctgtttatacagctgttcaaaatttcaatcccatccttaggcacaaaatgtggagtctaaacttgcccatactgggggcggataagaattcagataacctccgatgatcaacggttctagcctgttagcgtcgggacgggccggactgtgggtaagtccgcggagttaccaaactggaacggggtactccggtttccgtaccgagctgtataagctttccataatacaaggcgaaaacgggtaactctattactactatatctcaaacaggcaagaagggactggcaggaaggaactggcaaggcactgccccaaggcaagagcattcctgggttcctgtctgaggaaggaacgatattgaagaacatctaaatcaatcgccaccaataaaacagcatggttggtcgcgcgccgggcgctaatccctgatatggctccagcaccaaaaaacgccacgatctagtactagttcatggtccaccctagtggcttcaaccttatcgagcaattttatacctgggtcgcttcatactgattaatctatgactggtaagatcgaaataatttctcggcctcagttatctattgtccttactactctcggcgttacttctaagggtatgaaatcatgccatattatttgtcttagtcaattaggaacacaagagtcgtatatgggctccttgggctattgcgtgtccaatgcccgagttagattttcaggccgttgccggaatcccaatggttttgcaacagcctatctttctgcgcgactctgttaggatctacaagggacaatccggtttgattcaagtggcgagtggcggcgttggacagacataaattatttggcctcaacttttcggggttgcctttgatcaagctgcaacaatccggggcaatagcgcctgtgtgaatttccaaagaacccctccattgtgagagatcaatgcagcgccggtgtaccaagttctacgttttccctgcaacgcatacaggtcattgtagaaaccgtcgcggatagcctgagccgacacacttagcttgaatggcgtgtgagagttgagattgatgatttggggagttgtaatcgtaaagttccgtgcttcctgtaggttctgaatggctcgaatagtcgcttgctcgactgccaaccgcgtcatatgtgacgggctgcggtaccagacgtagaacactcccggaatgcggatgcttgtaatttgggaagctccaggttgctgaggaatatggtacgttgcagatgagttgttctcattgatccactggtacccttcgggcaaaccagtgttattgggtagtagggtatagtagcccatataggttcactgcgagaacatctgaagctcctgtagattgaaattgaatggcctcatattttctaaagttgggggaatgttgactaaaagcttagatgcttggacgagcttgaatcccgtggtcgtcttgacgacgagtgagacgcctcgccctgtttgtggtcttgcagcagctgtaacggttgaggagatgagagcatctgaacccagctcagcaagagacttgacatatagctcagagttgtttttatctgcggcgttgagcctagcacctgctatttctctcaagtatgcagcgtccaccatcttcatcacgttgactgttaactgctgtagtggatttgaaattccctgggagctgaaataaatattaaaagcagcatccgagatgttatatttgacaaggaagtcccccaatggtaggagcaggtctggaggaacaggctgagggatttcccaggtagagtccagccaagggtactgcgcgacctgaatggcccatccggtcaggtttcgactggggttgaatagcacagggtttcctgtattaaaatctgtcagcgagatagtggcattagattcggtatatttgacaagggagatgttgaagtgggcaaaatagtcaagcgcgatagagctgttcaggaacgattgcaccccatagtccacagtgagaccggtagctttatcagtgtaggtgtttgtgtggccacccaggtgcttctttctttccacaaccactacgctctggcccatcttgcgcaggttgatggcggcatatgttcccgaggatccccctccaaccacggcaacatcgcagactaggacatctgctttggcataatttttgggatcgaatgtattgccggtgattgccacggctagccaaaatgtgaccacggaaggaagtcttgacagaaacatgattcgggagacagcttgatgtattcggttgaggttttgttttaatcccttggtatttgaacacttatggcgcgatatgtgttaacacacagccctttcaattcatatttctaccgccaggaggtgttagtcagtaaatgcaatccaggaagtttccgtccatccagtggcgactgctgtagaatctgcactaaggtattagtgtcactcacgcttccagatggggtatatctcactaagttcgttgttcaacaagacccagttcgtctattttattagtttcttgcggttcaagagtctagtttcttgaaactcccacttcttcagtgttatctgtcggcgacaaccattgcaagaaatagcacttctatcctccctcaggtttcttgtatccgaacatccgacaacataccgacctagggatgtagcggaaagtggggccgtcaaataagcgttcgggtgtgggttgatcgtctgcaggtggtgtggatccgcacataaacagttgtcaagagtagaatagtttcgatggtgatattcaatgtgagggagtcgagcataggtagggaaggagcggagttctgctttggggaagctactatcggttttgacaaatgtcgtccacaaaccccaacacctaagaaagtcgcgctggaccccaaactcccaaccttccaagcaaccaccccaattattccctaccagcacaactacaccaacatcaaaccccgaagcaagatgaagctcatcctagctggcgcgaccggtctcctgggcactgagatcataaaacaaagcttgcaaatccgcgagatcactcaggtcgtcgcgttggcccaccagcccgtgcagctcgacaaaagcatcgactcatcgaagttgaagattatcgtcctttgcgactatggtgattatcctgacgacgtgaaggctgagtttgctaacgccgacgcgtgtatctggtatgtctcgggcagcaccttcattgcctaattcaaactgaccacaacaatttgtgcgtactaccggtagggctgtctccgtcacacccttacgtaccagcaaagctgaactcaatcgtgtattccacgactgcaccaagctcgggtttgaggccatgtacgaggctggaccggcacgtccctttcgtttcatgtacttgagtgcggatggaatatttcgagacccgacaaagaaggcagtcatcatggcagattaccacatgatacgagtaatggattcgaatcccagagctccgtgattctagaacttacgctaatgtcgtgcttttggtgagctagtgcaatgcagagctcatggtcctcaaattcccaaccgagaacgaaggagttgaagtttgcatcgctcgtcccggcgtgattgctaatccctcgacatggtcgagagctttggtggccaaccttttccgtatcgtcggttttttcggacggtcccttccgaatatacaacgcagcgagcttgcagcggcggtgttgaaccaggtcatggatggattcgagaaggaagctctcttgaatgccgatctcgttcgcattggacaaagggagctgaaattcagcagtatgccttatcgatgctgaagatagaaaaggaagttgagtgccaggtttgaggggttctcctcaaactgaaaatttggcattgtctctgttttctttgatttggaatgtcactatgctcctactgagaaaggggcgttggtggcaatccacacgataaatcctttttttatcatacccgaccacaaaccaattgagtccaagttgcaaagtctctaatcgaagcgaattattccgcgatccatcacttttcgtacacagacatacctagaacaaacacatagacgtattttcctaggtgatagtggccaattcctgatccagtggcattgaggcaaatttccatatattatctctcaagttaggtgattttgacagtactagcctttgtagtgcgaggtttcaaacatggactacggacagtccttttgatctattagacctactagtacgaccacattataacgccaaccgatgaataaatttgcagtccagacaacttccctcccccacggagcggcaaattccatgtgggcgactccgcaaaatgtcatgaatggtcataatgacgatgcagaatccccccagcctataactaaggccccatctccaagcaccgacaaatctcccaacagacgctcgataattcccacattgaaaatggtcactcccaacgatgctcaagccctgaacctggaggcacgggaacaagaggatgagacctcggatatgaaagatcctgttgatgccggttcctctgacatggacgaggaaatgagtaagtagcttcccttgaacaattccgactttatcatctccagacctgctaacacaaatcccagtccaggactataggacgcttatggataagaccaacctcgtggacaaagaccgtgttcaaagcgcaaaggctagggtatccaaggcctactatcaaccgaacgaggaggcaagtgatatttcttggcggcctgatccgtcgggtcatccgcggaggactttctaggtcgttgtataggagtatagttgattccttctcagagaatgaatgtcatattttcattcgctttgtgcacgccagtattgcccacggagcataggcagttggcagtaggatattcgggagtctccataacctctaccatgtgagattgaaaactacgctagttttagaacccttaattctagtaaaaaaagttagacactctgcatatcattgggagaatggtttagtggccaagtagacgttaaatcctactggtcaagatatgccgaccccggattccgagctaggtcatcatgcagctaaaagttaagatgtggcctgcataacgggagatctacacgatctagccacgcgggcctagccaggatgcaaaccttgaaagtttaaggcggcaacacgggccttctacgcgacatcaatgtgttggaaggaagcggaagagataaataaatcgtgtaaacgtgaaaaatcaagtaaatgctatatgtacaagagtcatgtcgaacgccgtcccaatttgtgcaaccggtttccacccgctcaaagctttccctgtgcctccttggccgccttggcgtgacgctcgaaagaggacacggggggagcggagttggggttggggtggtgcttcttgagcgccatgcggacattgtactccaagtcgagagaggccttggggtcattggtcttgggcttgaagtctacgacgagatcatccttgacagcgaagacggagtcgatggcgagatgagggtcgtcgctcgggtagatctggttgatgacggtggcgtagtcggggtgggtaatcatgaggtggatgtgggcgggacgcatgggcgaacggtccatgaggttgaggaggacaccggcggggccgtcggtgggcagggagtaaggagtggggtggtagcagtaccagttgaattctcccttctcatttgatcggaacttgccgcggaggttgttatcggtctgggtggggtcctggaaatcgtattggccgttggccgaggcttgccagatgtcgaggacagcgccgacgatcggcttgccggtctccatatcggtaatggcaccgtgcataaaagtgacacggccattaggcttgggatcctggatgatgctgtcgccgagagcgcggaagggggcgttgggagaccagaaggggccgagaatgacgttggatgtaggggagagaccgtcctcggtgatgatcttgttggcgatctcatcgacgagactgatttgaacagttagctttagcttttctttttttcgcttttgttttctttttttttattagaagcagatgtgaaacttacgactcaaggccgatcacgtcacaaatacggtggccttcgttgcggataggagtgctgatctggccgatagagttgataaactcaacgccgagcatccactcggcggaggtcaactcaacctcacgagcaaagtcgtggatgtgcttgataagagaacccaagaccacgcgagcacgctcgggggtattggggcccatgccattgatgacagagggggtgaagttggggtcgaactggcgtgtggaagacattttatattattggagagagctgtaaaagtcaaggaagtcagggcggcctttccaggtctatatacacgataggcgacggcatattgttcggctggtcgtggatgtggggaagtcgcaacggttccaaacccgcaaaaatcccgttgtcacctgccgaatgtcgcgatcgcgttcatccacgatggttccgttctggcatcggtcagtcctcaacagccgaggggcggctggtctcctattatatcagcgcggggtggccggggtagctcttatccgcgggtaagccccggcacctgctttcaccgccttttgattggttcggcttttggtcttcctcacgtgccgacttgccgatgtctggagtttacggagttgatatgcaatgagagggcaataatacagattctattggtatagatctaattcagctatgggtcaaatcttcattaatactgaatttctaccaaatcgctcacctcgtaatgtcctacatcaaaatccccacagtctacctgctgattgatcttccttaataatgccttcaaaccctcgcggtcttcgtcgtcacattgtggccaatcctccctatcttcccccccctcgccttgggtcaagaaactgagaaggacctgtaccgctatcaaacttcatgtaccggtcacacatcaatgccggcctaaggtccagttctttctcaaaaggcaactcattgtacgctgaatcccatgcttcattgtgaccaattgcaaagcgacagagatatggaagacctgtttcaaatgaggcaaaatattcattccaccggcgtggataatgatagtaccagtcctcgcccctcctgtgcttgctagtttgccatttcattttggatatcggtactgggcaatcgtcaatgtagtattcgacgttcgataatctcacttggaataaaatcgtacaatcgtcaaggtagagttcatggagtgttgacgagtgcgagagaatccaatcaacctgctggtcttcgaaaaaggagaagtttcccagagtgagcgattgcaaattgggaaagtgaaccccttcgaggctgaatttaggataaaatccccagtaaaggtcggagtaagagacagcttccggaatggtcccatcgtgggtttcagccagactgatgacaatgtatgtgcgtagaactcacgcacttcctgtttctgttatatctcgccgaattagtataaaatattatactcagcatatgttgaagatgtagactggcttgtgttactatgtacctcgagttctgcttcagtacacgcagggtcgcattcatgcacaacattcagtctcaacgaacttagcgtactcagtacttgctgtaaatcttcgctcagtggtgtcacgttctgctgatgctgaatccccaattctttcaacggtcgctttaaagacacaagccccgtacccagccattctaagatggtttctcggtattccagtgactgggggggataaaaccaaccacctccgcccatcgcggcatatttgtccaagcgcaggacaacgcttttgagattcggaatatttggaagcataagtaggagctccttccatttgacaggtagttcaagctcatcgttatctgtgtcggggtcctaatgtgttgcgtattagctacccattgactgcatgacagtgcatatctcacgcacggatataaactccacagtattgaggcggatcttgtgcacgtattctttcaactgcggatgtgttatgatggactcgaaagcctcacaacttatatcctccgtaaacagtgaggctgtggagaacagattcttcgttgcagaggcgcataacatgtggtttatcagcctcagggccttgagcgtttccgtgtccgacagagacgtgatgatcgcaagtagctctgagggaagagtgaataaggccatattcttgcagtggaagatatgattaccgatcagaaaaggaggtatcagaccttcttaaagaacatctggtccgatatgctagacccaatgtgactttcttggcgctgttttctaggcatccttagacagaagggtggcggttagcttgtgtcgacggaaaatcccgatctagctactgatcgctctttgtcctttttattctttcaatcttcgtgaaactccgcacaacccctaaaagtttttatcttatctacacgggttagctcccgaggtcacctgggcaactttctccgtaacgcgatactcatactactgcgagttcataggattactgtactcttcctgacgaaaatatcagcacagacatgatccgtacgttaggcaaattataaggctaaattcattaaaggatttccagttcatgttcaaagatcataggctatccacaagaaaccaatgcaataatcaccaagctaaaacctctttctgagctccacaggccagggccgcacaaatctgctcatccttctcactgacatctgcattgcatgacactttcggtttcgccggccagatctctcggcccgcggatttctcacgctcaaagtgctccgtgatgacatcgcggactgtgctctggaagaacagcggggccttctcgtacttaggatgaagctcgccgctcgtaaagacattccggtcgaggttcttctgtgcgttgttgcagaggactttgtcttctcccatgacgcgcgcgtacatctcactgataagcttgaagtctgtctcagaggagttccggttccggtagatctcgtagtccatcttggagtttttcgggcttgaggggaggaatttctgtatcatgatgaagtgcggcctgtatgtacatgttagacgatgtactattggagaaagcacaaactggaaacacttacgagacaaccatggcagacatggggaagtagtaagtactggccgtgtaaaggcccttctcgatttgctctggtgtagattcgcaatggtgttggatatgtccatctttgagatcgctgtcgaaagattccaggttaaggaactcaggaatatcggcgtgtgttgtagggcagtggtaacattcgttgaagttatctgccagaatcttccagttatagtcgccctcgagcgcataagtgtgatcgagatcgtagtcgtcgaagttataggctttgtaccgttcttgcttgtcgacgtctcggaaatggtcttcccatgacacttccgggacttcattcgcatccatgttgacccagatgaagccgttgacgtcgaccttcagatggattctgaagagaccgttctgctccttatcgaagttgctcagctcttggtatttcgtagccttggcgagtttgccattcagtccgtaggaccagccgtggtatcggcaagcgaggatttgcgagttcccggatccctctttctcaacgaccgggtacgcacggtgtctgcacacgttgtggaatgcgttgatgttaccctgtcggtcgcgagtgatgatgaagtcgaagcctgcaagctcgtagcggagccagtctccggtgttcttcaaccgcatgctgtgggtgatgaagagccacctcttcgagaatatggctcggcgctctagttcgtacatctctggtgaagtgtaccatgatgcaggcaaggcacgaacggctgaagcttttgtttcttccttgggggcagtggcattgaagccgaaatagttgagcattgaagccatgattaagtaataagaaggtacagtggagagtgtcttccagtcttttttgctttaatggtaatcatatcgatccctttatacgctccagaacaatttgatgttagactgatagccacgtctatacagcgatcatatgaacgatctggttccaatttggtaggacaacccgtcgcgaggcgggttgatcttccaagaacagacatcgaacccgccaacccgccaacccgccaacatagtactacaatccgtactacaagccgggagacttgacactattgttgattattgggtcaaatgttatcaaacccgacatatgcttgggcagccattctctagttctacgctgcagctaggccggcatactacctgtttatctcgagtccatagataatgtagccggaaatacttcgtatcacctacaggcagtttgccaaatattcgttcattgttattgtaaaagagagaagcttaacagataacatataccaagtcaacaagcacaacagaagtctcccctcgtgttacaatgtgcatataccggattaccccactaacctacctagttgaggtaggagacatctcatacattggaattttgcaattatccttcttaaataataaaaacaggctcttcgggtttgatacactccagcagaggcaatcaagcggcttcatctgtggtgctcccactttacatctcaccttgcatccacactcccgccggccgatatcacctcccatcgccgaccaacccctcagaatttaaatcaaaggacctctgatcgccatagaaaggctgctgccagatatcccatggcgtctagattctcgagatcgagtattcccacagtcagcaggcccagagctagcacggttaacctatcaaaccatatacggacgggatattcatccagaagtccctggtgatctagtggtgcagggtgagtacctgggctggatgccaaaaaagcgcccggaagagtaagtctctatcaatctctaggtcctagtggaagtaaccggctctgatattccctcctgctgatccgactaggctgattgactattatggtgccacatttgaccatctcgtcccggctggggatatcaaccctgaggtgttacagattaacattattgagattgagtatgatggtggtgtttatgcgaatacatggctttcgtttgcggtagattcgactgagtttattgggaagagggtactggcagtgccgagatgttgccagaagagaaaggggactcaggatcgctggcgggtgaatgcaatgggggactagagggttcatgggtgggaactgttgatgggaggatttagttaaaggtctggagaaggatcaaaaatcgggcggaggttgagaacttgaattgatatacatgcgctgaattctcttctaacatgattaatacgggtgatgccaaacactggacatgttttgtcttcattgaatagtagtctttctcgttgtttttctctgttttcaagaggaatttggtcgtattcgtataacatcgtcattggagaaaagtaaattgcttccgagggccagcagacacaatgtacgttttccttcggataatgccacgttgaatcttcatccagcatcaagagtcttacttctttgcatcatgcaattcacctcgctctttcactagattcgaaatcgcaacgctggcatcatcccccaacttcgcgaatccctgaatcacaccctcacgatccccaggccgcatttcctggctcatcttgaacttcccctgaagcttggtgatccgaatctcaattccaacaatgtttttcttcaggagatcagtgtacgacgtaggcgcatcagatacctcccacggctccggtttatcaccaccagtataccccatcgacctctccgaatgctgcgacagatcatgcagctgcttggcgaggaatgcgccagtctcgggtgttttggaatcatagtatagcgacatcttgccgtacgcctggacggcggagtaattccatgtaggcacaaccctcccggtatctggctttgtctcgacgtagaatttcggagtcacgtagtgctcgtatttgccattgaagagcactaggacgtcgtcgtcgagttcgagaacgttcggtggcttgtcatccacggcctccatcattgacttgacttgtggattctgcttggcgatgtgggcgcggagataggcgtctgtcttgcctgtttcctcggggaaatccaccacgaatggggcatgggtgcactgtaggaagtcttgctgggaggagttcatgccggtgatcaagaccccgagtgggttttgccggatgaaatggagcaaggcctctttgtccttctcctcgtgggcgctttggaagaacatgttgaatagtagctgggaggttcagaggatggggttggaagacaaagaggcgtgaagacaattgtgtagggacaaaagacccccaaaatgtcacattgtcggatcgttgatttgttatcaatggccaaggattcgtccactaaaggcatgtgcaaccggctgcagagacccagcggggcgggaaggcgcagggactttggcatttccccaccggattatcgaattcccgagacaaggcgaggagatcacataaaagttggaatccatcattgacaaggtcagacttgagatttatattgcgctccaaagaaaagcagtgttgtcctgggggatggtagcagtctatcatcgttcatatacaccagattgggtatagcgcaatctagcagaaatatgaagggctgccattggtcgtctccagtaggatccacttttgtctacgacacaaatccacacacaacttgatatacggcttgagacactaccaccagaccccggtataaacggggcgcgagtttataataaaaccatccattcgatatataagatagggggatagaaagagggtataggttgaacgcaataaaccgtgaaaaaaccagcatagaagccacacaaggggaactagaaccaagactccatcgctccaaaacaaaagccacctgcgtaaaccctcaagatacgccgatttttgagtaccagcaggtcacaagaccccgcatataacaatcgaatcccaatgactatctgtcaatgagatcagagtagaatatcaatcaaacagagaaagatgaggatagtctggcatgcgggtcatcgttcagaaaaccaacgcagctcgatattgcatcgtaatgtgttgacataatcttcgtcattcctcatggaacattacattgcgagactggctgagcctgcagccgcagatccccagcgcagttttcgcagcccgccgcggaccgcttcctggccacaccccactgaggggcgaggggtagaaacaccatctcccaccattccgagctcggctcgcccaacctcacggccaatcatataccccgcggaaaaactgattgcggagaatagaacgacaacacccgcgctgatgacccatgtcatgaccgtggggctcatggccgttgttggatccgtcatactcacgcgacgactctttttcgaggcaacaccgcggtctttgggagaacttgaacgacgctttgctttggaggcagagtcagctgataccgccggtgctcttacgcgtctctgtggtactcctatagacgggcttgattctggatagcgcggcgaggatgggctctcttcgtcgctgctatcatctcccatggcaactgatgggccgactagtcggaatgaagcaggttgtccgcttccagggggagccgccggggtatctgatggtcgactatcattcttgggaaggcctctggcggcagccgcacacgaaagaagtgtggatagactggcacgaagggcggcatcgtggtcggcatgatgggaaggggagatcatgttgtaagggctgtgctgatatggagatctccgcgatgaccgtgggttggggtaggattctcttcgaggaacggtacggcgagtagaggcagacgggacactagattgtggacgccgtgcagaccatccaggctccgacgtcgctggcgggtgtgtgaatatgtttggttgaggtacgaaaggtgatgtgttgattcccatccctagggcagtagaactatcatcttcatcatcgctggaggcagcatctgaacctgagaaaaggggtacagagtgcgcggataatgcagttcgcagccttgggcgggtcatatcttcatttgagctgctgagaacatgatcagactcgctttcgctctcctcatattcctcttgactgctactggtttggctggcatcctgcgacgcataggccgcctgggcagtggtaatagcggcaagatgttgcagatggcgtcggcgactgcggcgctgatatgcgcccgcgcctctttgctcgacccgtaatccggttgtaattatatcttcatttgtggcagcagaggaaatggaggaagaggagggttgggaggacacgtcgatccaagaatctatgtagtatcgtagtgagtacattatggagatctgggagcgattttgtatgcatattgaaatttcaccggaaagggggtaccggtcgcattataactacataccctctgatctcatgggcgccgcacccgatggctgaggctgaccgttatctcgaagcggctgatggccatcgcgcgtcatccgacttgcggctctagactcacgcgcctgacctagtaggtcgcagtgatttggttgcatattgagggttggaggaatatgggaggatatgggcggagacgaacaaaaatatagaaaagagggggtcaggccaccctggaatggagcacaagagagcggtcaacgtggggcgggagagattatcttatcaaatgtggagtcgatcgatcgatgcccgacacaatgtatactcctttctgctaacaaaaagcaggagatgaaaggggttgaaagggatcaagatgattatgtttctctgtaggacagaatgaaaagagacaaaagaaagatgaagagacccaggtggaaagaatcgaactgatgaggtgatcagcggaccgaacaggtgatttgcagctcgtgacaaggggcgaaagacgatgcgaggggttgtcagaggtaaagggcgggtgttgcggttcttattgtagattttgagatcagaccttctttcatcaataatccgatcaaagaaccttggagccttggaatgagttgtaggcaacacaaagaatagtctgggcaaggcggcaaggcggttactagtggcaatatacttacaacacgaagaatgaaaaggagcaaagttgatcaaaatgaaaatgaaatgatgtatcaaattaaagatacctgagctaaggtcatattacacataattaagcacgaacttttttctctcaaagaagacctgagacccatgggacaccgatatgatgcggaaatcaaacgtttaaaggaaggcacctcaagttcagaaagtgaccttggtacccttgaactcagggatgctgcccttgcccttgttgaggccaccacggccgccacggtcgccgaagccaccacggccaccgccgcgaccaccaccaccacgtccaccgaaaccaccgccgccgccgcggccaccgaagccaccacggccaccaccacgaccaccaccacggccgccgaagccaccacggtcaccaccggcaggacggggagtagagaagtcaagacggatagcacggccctcgagctcgtggccgttgagagcagcgtgggcagccttggcctcatcaatggaagcgaactgaacgtaaccgaagcccttggggcgtccagtctcctgctcagtggggagacggattccgagaacggagccctgggcgccgaagacctcgtggagagcatcctcagtagcgctgaaaggaaggttaccaacgaaaagagtgtcgctctcggggctggtggtgtcaccgtatgagcgagcacgatcctgggaacggtcggcaccctgctgggggttggcctggcggggagcggcgtagtcgaggttgatggtacgaccatcaagatcggtacccttcttggcctccatggccttagcagcatcggcggcgttggtgtactcaacgtagccgaagccacgcgagcggccagtctcacggtcggtaacaatgcggacaccggaaagctcaccgaactcggagaactcacgctggagccactcctcgtcgacgttccaggacaggttaccaatgaacaggttggcgacggcaccctcggggacatcctcggtcttggacttcttgacagtggcggcaggctcggcatcagccttgcgcttcttggagacaggggtctcctcggagtcagaatcagagctgtcagagtcggaaccagactcggagtcagaagaggccttcttggcctcagactcagactcagattcagagtcggaagagtcagaagactcagccttcttctcagccttcttgggggcgggcttctcatcctcggactcggaagagtcagagtcagagtcggaagagtcagaagactcagccttagcagcaaccttcttctcgaccttcttgggggcaggtttctcctcctcggactcggaagagtcagagtcagagtcagaagagtcagaagactcagccttagcagcgaccttcttctcaaccttcttctcagtcttcttgggagcgggcttctcctcctcagactcggactcggagctggagctggaggaagcatccttcatatcctcatcagactcagactcggactcagactcggaggagctgggagtaggctccttcttcttgttggtcttcttggacttctccttggagatgaccttgctggcaacggccttgctcttggcggcgggggactgggaagccttggtgacaccggcatccttgaccttgttcaaggccttgctggccttaccggccttgccggccttatcggcacccttggtagatgtcttggacatattgaactagaggaaaaatcaatgttagccaatgctcttcgatcaaatggaggggactcaggaagagggcttggaggctggcttgtagcttgggtagggtggcacatactttagtgacaagtgaaattcttgtagtatgtgcggcaaagcccacgatccctcaaagcacccgtgttttggatgtgtaaaatggaacaacagccctcagaagaactgccagaagtgaactaaatcacagctggacgttaacccactacccacggacggacaagttttcaagcccacaagcaaccgacagctgatactgtctagaatatgtaacccacgaggaagatgtcccacagagcccacagaatagatgtatgtcaagcccacagccctcagagtgataagaagccctcagagtatccaaacgaacttacgagatagaacccacgcgactgcgttagttagtgtgtagaggtctcttgggtagtcaagagatgggataagtaaagcgacctgagacggactgcttattgaacgggggatgagaaaagaagtagggaggatggaaagaggaagagaaaaaagtgtgaagagctggggaccatcagctctgataaggaaaaatttttgaaaaaaaaattcggaggctggcagaaccactccgcctgcctaaagaggctagcgcaggcactcggtcccaacactatgtgggtaccttgccagtggctgtcgacgactcacaatcgcgtgttcacttggcggtgccttttgcttttgtctacgtcgtgtacctgctacgtcaattcttctgctatcactatactcgtccaggcaccgttcgacttttttttagctcgatagtcaatgggacgataagtttccattggcctttaacgtgatggcccctccgacaccctcctcgcaccgccctcgcaagaagagaaaggttgcgatctcccccggctcaaacaataacctgatcttggatctaggcgatgggaagcaatctccagcatttccactagtctcatttttgtgggctgctcgggccggtgtgtctcaatggctgattctcccacttgtcctcatggccgttggcctgttccgatgggctgtgagcttatggggttactctggtatgcgacattgtctcttcggaggtcggtacatattttaatatcttctagggttccaagttcccccgatgcacggtgatttcgaggcgcaacggcactggatggaaattaccacacatctgcctttggcaaagtggtacacatacgatctgcaatactggggtctcgattatccaccattgaccgcatatcacagctggctactcggaaagatgtacatttccctacctgccatgcattgtggaatttccaggcctcctgctgacccgtcgacctctctagtggctctgccttcgatccagcctggttcgccctggacgcctcgcgaggtttcgaggacccccgtttgaaagtttacatgcgcgccaccgtcgtggtgtctgaatacttggtgttcatcccggccgtggttaatttccttcgccgctacactcggatgcagggtgttcatgcttggtccgcctcaattgctctcgtagcagtcctccttcagccagcgaacatcctcatcgaccatggccatttccaatataacacagttatgctgggattggtggttgcaagcttggacgctatcttggcggggcgtatgctctgggcttgcattttcttcgttggtgcactgggattcaagcagatggcgttgtactatgcaccagtcatgtttgcctatcttcttggtgtctgcacattccctcggattaatatcccccgtcttgtgagcatagccctcataacattggctagttttgctttgctgttggcgcctcttttggttggtgcctccaatgccgaagctcgaaaggcatttgcatcttctccggtgccgccgatgttgcaggcacttcctatccacatggacaagaatgccgttgcatatgggctattgttccaactaacgcagatcattcaccgggtgttcccctttgcgcgtgggctcttcgaagacaaagttgccaacgcttggtgcgccattcacactttttacaagctcacccgctttgacactacattgttgcagcgagcatcgctcggtgccacattggcgtcaatcatcgttccatgtgctatcatcttccgccaccctcgggcctcgcttctccttccagctctatctgccgtctcctggggatttttcttgttctctttccaggtccatgagaagagtgtgctgctgcctctgctaccgatgaccctgctgcttgctggtaacggtggactgagcaaagaaacacgcgcctgggtgggctgggccaacgtgcttggctcatggaccatgtaccccctccttaagcgggatgagctccgcgttccttacatagtcatgactctgctctgggcctatcttcttggcttgcctcctacttctttcgaaacctatcgaagtcggccatcccaggaagattccaatgcccaattcgaacctagcattctcacaactcttctacacttctctttctatttggccatgattgcctggcatatcctggaggcatttgtggccccgccgcctggaaagccagatctttgggttgtcttgaatgccttgatcggagctggtgggttcggaattgcctatttgtggtgtatgtggaaactatttacccaatgtcgcgagatcagtcggcaggcgaccgaggaggaaagccagaaaaagaagcagtgattgttagcccaggtggaggctgtatgattttcagtgataccctatattgtgagattatccaaaatggagcagtaaatctgcaaattgtttcattaatatgattgagtttgatatttctttaagaggtgagacgttgtattgggaaactagtgccaaactttatattccaacatgtcacaaataaccaaacatgtcctcaaacagacgacatccggagaaaacaaaaactcccgccaatgaatgctatagtacaatgttgtatagtgatagtacagccgagggcattcggtcagagatcaagtctagaccttgaagccaaatccagccatgcaagtcttgtactgctcaatcgtggacttgcactcctgctcggggttttcggacttggagaagagcatgcagtcatcgcgagcggtcttctcgggtttgcagacgcagcagggctagaatgaaggcaggatcagtcgcttgcgactgctgggtcggcagtatcgggtcataccttgggcttttcggactgggcgggctgagcgggtgcttgctcaggggcagcggcacttttctctagaaagcattgtataagcgagggtcaaaatatttttctgacactgatatgtaggactggcgcattgcgcatgtattcggcccgactaggtggaaagaaaccttgatttaccttttgaggaaccgaatagccaggacattgtgatggatatgtaaatgtgcttggtaaatatttccagtaaacgaaagacagaaagagagtgtcaagtatgaagttgtgaaagtcgttacacgactccagggctgacaccatcggacattattaatggcaagtgctgcgcaactggtcgccatgccccgccgtatttattctttttttctgttgtcaacaaagtcgcctctccggggtcgcctcctacactacagactgtttcggttcttttctgtctatccttaggtcttgggtctcctcgtttctaggatattgtctgccattgacctcacgcttaccctattctatttctatttcttatctcattctcccacttcaacaactaccccgccatggcccctcacaaggtcttctccctcgagggcaaagtcctcaagctcgacaccgcagaggacatgaatgcacacattcagcccttgattgacaacaccgactacactgaaatccgtctcggtggaaacactcttggcattgacgcctccaagcgcctggccgaggttctgcagaaccaaaagtgcctcgaagccgcctactttgacgacatcttcaccggtcgtctcctgacggaaattcccactgctctgaactcactccttaatgccatcctcaagatctcgaccgtccacaccgtaaatcttaacgacaatgctttcggtctaagaacccaggccccgcttatcgaattcctctcgcgccacgtacccctccgccaccttattctaaacaacaacggactcggccctgccgccggatctcaggtcgccgatgcgctgtcaaagctggctgagcgtaaggaggaagctcgcaactgtggcgaggaggtcgcgctgctagagagtgttgtctgcggacgaaaccgcttggagaacggcagtatggaggcatgggctcgtgcctacaaggcccacgcggccggcctgaaatcggttaagatgacacagaacggcatccgatcggagggtatctcccacttgttgtccgagggtctctaccacgcgcattccctggaggttctggatctgcaggacaacactttcacccatgtgggctccaccgctctgtcaaacgccttgtccggctggccgtctcttcgcgagcttggtgtcggcgactgcttgctctctgcccgtggtggtgtgaaggtggcccaggctttggcgcagaacaagaacccgaaactccagactttgcgtctgcagtacaacgagatgaaggcggaggctgtcaagagcttcacccatgcagccaagactgcgcttcccagtctccgtcgtgtcgagctcaacggaaatatcttctccgaggaggatcctcacatcgtcgacctgcgtgagcttttggaggctcgacagggagagcacggtaccgacgatgaccccgaggatacttggggtgttgatgatttggatgaactcgaggaggaggattcggaagaagaggaagaggaagaggaagaggaggacgaggaagaggccaaggctgacaaggacctaaaggatgcggaccttgccgaggaagagaaggtcgctgagagagaggataaggacgtcgatgacctggccgatgttctgggcaagacaggtatctaaacctctggagctgttggataattgtcacttctatcagtacctgccttccatcacggacggatcatggatccaataccacgttgatatcatcaatggctgagaaacccgcgccctcggcttaattggtgtcctcctggccatccatggtccctttctgtgtccacggccacacaagcttcgggtatgaggatctcgccgacgacgcttacgctttgccttcaaaagaccccgatttttatacccccaatctccaaaatggaaccctagcttgcacataattccctttgctttgatccatattctgtttgcatagccatggacccccgtgtttgcttcggaggatacacaaccatatagatggaatacatatccggacaagcaggaacattcaaatactcatatatctcaataaataaacaagtagtgtgtatacaaagttgcatataaatggaacaaaaataatttccgaaaatggaacccaaggcttggcgcagacctcggacatcgcagctcatcaaattccttttacctcgtcgcctttgacatattccctctaccatacctgtcactattggcgcttccattgccgtcgcctttccgctctttcatttctttacaggtctcatctcgcaacactgtaccgtggacgcgaccgtgaaatatccccaggtgagttccgcaaaacacccctcactacatcttgctttgcgcaatcacccgttgttcttcccggtgcaagctataacagccacatatgctgctgcatgccgttgtttccaatcttctttgtttgttttcatcgagtttccgaggccaaatgggagagagagcggacacgtgcagttgacagtaccaccttctcccgcattgtctctatggtggggtattttaagagccatgttttgtgttacctttgttgaaagcacgtgtgctctatgatctgtgatcccaacagggagacaaatgtgcctgctgtggttctggagaatgcgccaacatccggggcttctagagaccctgtgctctatatgtttgcgatgacatgctgacagataggactcatagatcgcctggaaaatcctcactcggtcctccattgaccccgtcaagcactctaatcgcgtcatccctctaccccgcacaacatggcgatggacgctaaagagatcgaagctaaggccaaagccttgggcaaggccgcgacttcgaacgagtcgccagctgtgattatcggcctcctgaaggacatccaaagcggcgtgcgggcaaccgaagacctcctccgacagacgcgcatcggaatcatcgtcaacaagttcaagcagagcaagaccccagaagtcgcgcggctctccagcgagattgtttccaagtggcggacggaggtgaacaagcagaagcaggctggttcggcagccggtcgtggttcgagcggctctccgcggccagcgcacaacggtacaggagcgtccactccggccactgcgacaccctcagacaaggcgtcgaagctgtctgtgcctccggataagcgaacatggaaggcagacggggcggatatcaatcataccgggaaccgagtgcgtgacagctgcacggggctgatgtacgatggactgtgtgtggggtcgaccgagtctcccaaggtcgttctagcacgcgctattgcggtggagatttctgcctacaagtacctgggaccggagacgaaggaggaataccgtacgaagatccgtagtcttttccagaatctgaagaacaagtccaacccgaagctgcgtgtgcgcgttgtcgagggagagattactgctgagcaattcgtgcgcatgagccacgatgagctgcgctctgttgagcagcgtgaggcggacgctaagattcagaaggagaatatggacaaggctatggttgcgcagcaggaacgcagtatcagtaagagcttgcagtgcggcaagtgtggccagcgcaaggttacctacaccgaagctcagactcgtgcggctgatgaaccgatgaccctgttctgtacatgtctgcactgcggcaagtcctggcggcagtgagctcggggtgggggagcggaaatgtattattttgggggactcggtgtttctttctttctatttcccttttctctttctcggttttttctatcaagcgaaggttatgaaggccgaagctggagttctactgtgggcctttgatttatgtcttcttctacatctcgaagctcgtctgggcaaatggatgggaaacagtcgtgaactatctaccaaaatgcagatatccgaatgattgatctcaactcttattcaagtactccgtataggtgttctactatataaacacagcaacgtcatatgatgtcagtatgcactccaccgcctaaggatctcgaaccatagcttcaatcactctcccattaatcccatactatatctacactccaaggccaacaaagatccccaacatgacaacacgctcagacctcctgaaaccagtccaggccctcatagaagccctaacgaacccaaacccaacaaaccccaaccaactcctctcaaccttcacaaccctcccaaaacctctagcctacgaacacggtctcccacaactagcccccttcctaggccggcccttcaacggccaagatggggtggcaacgtacttcgagctcatctcctccctgctgggaatcaagaacatggccttcgagcccgaggagagctgggtagttgacacgagctgcatggcagtttcgctgcgcggaacggcgacattcgtctggaaggagacacggcaggcatgggatgagacgttcatgtaccgcattaagcttgctgttgatgggtcaagggaaggggggaggttggcggtttgtgagtatcacgtttgggcggatacgggcgctgcgtatcttgctaggtgtgaaaggttgggggatttagtgggttctgcgagtgatggtgaggggattcatctagattacgatatgaacggggaggatatagaatagggagagatatatatatcagccaacagcaaagatatagcactggtgattgtgccaatcataaggagagagtgtcattatttgagagatttttctaggtaggtccgggtggtatacatgtattctacactctttgccgttctcctcggattattctatagggctggggcagtctatccctcgaagacgctgtggttcagctcaacacccatatccttggccatattctgcatctgggcctctatgtcatcctccataccaccacccagatgcaagaactggcgcaccttggtgaaatagaagaagatatcagtgctaaacagcaccacgcggaagataaaatggcgcccgatgttgcggatcttctcggccagcggcagatccggcgactcgataagcgcccgcgaagcccagataccagtgatcttaacacggttcaccggcgagcccaggaactggttattaccttggacgatgcgcagattgcgaccgatgaagatcagctcctgcggccacttggtttcatcgccgagcatatcacggaccgccttgcgcatcccctgttgcatctcgtagtgccgctctgcacgctccgacttgctcagtccctggagaccgcgctgcgtggacttgtctccgccgctgtagggacgcatcaacgttgctgatgcgaagatgtcagcgttgttcacgccccagtccttggcaatctcgcccagcgtgcgattgtcgaaggtaaggagggctttccagaaccgcgcgtattggtgtcggaacttgggatccatgtggatgtacaggccgtggtcgatcagaaccagctctgcctttccggacggcttacggcggatgaagatgttgcctgggtgcgggtcgcaatggacgtatccccacatgaacatctgggcagagaacagatctaccatggtcgtcatgacgtccttgactgacagtcctagcccgccgttgtggttagggcctcgccagtagtcacgttttggcttggtactcggtcgattcgcagaaccctcctgcggtcggtcaagcggtgtaccgtgacagcctggacttccctggtgccagccgccgcgccagggccgcgtgatggagtctttatcccagagtcgtacgccttccacccattcagcagtcatgacgcgcctcgagctcagttcgcggaatactcgagggatatacacgcggtcgcgcagacggggttcagcggccactagcctggccatgttttccgagttatctgcttcatttacgaagtctgtttcgagcgatagtctctcactgatatagggaacaagactgttgaaagggatgtcgaacattatgctgtagacaaaggtcacaactctttttcaatgttagcacaacattctctcgcagctgcaattcggactcacttaaaggcccagagatcccatgccaattgctgtacgatctcccgcttttggaccttgatcgcaatctccgtgccatcctgcagacgagcccagtggacctgagcaacactggcactggctctggctctgcgctccatcacgcccttatcagggtctcctgtaaatgaaacaccgaatacctcctccggcgacttcccaaaatcctcacggatgaccttctcgacatccttccagtcgttctgcggcgcatcatcgaacatgcgcgagaacatctgctggaactcagggggcaggatagcagattgcatcgcaatcgcctgacccatcttcaggtagagaccgccattatgcctcaacagatgcgacaaccgctctgcggtgcgggcgtggacggcagtaacagagctagccagtggtgggtgtgctcggaagttaattttgtagtcgagggcgacgaagataccgagagaaaaggtccgggctgttcgagtcagcgatgaggcgtagaactggcgatcgatgccccaggcgacgcctgttgctagtgagacatagatgatccggcgtaaccatttaatagttcgtttgtaggtctttgcttctctgggtttccctagggagctcggtgacggcggcacgaagggttggaattggcttgagtgagcatatcggtgcgggcgccggagtgagggacggatgacggtgggccgcacagagcggaggaaggtcgcgtacgccatatgaaattgtggggaggcggatgcccaatcactgcatggtgttggcgatcaaatccagtctgatctgaggtgaaggcaaaggaatgagaaggtcaagtgtcgatttatcaagtaagccagtaagccctagaggtcggactgtcgtcatcggtagctccgcatggagtcggagtcggaggaattcagcgatgtcttattcagctacaggcacattattaattgaggtgaatcggatataactgatattaattgcatttacagcactatttaagttgaatcagggtataattcataattcatcatggtcataaacccccaaagtatcacacactttcgcataatctctcatattctgaggaatcgtggtatcccacagctcgtcactctccaagaaccgaagctgctccttacacgattcctccgaagccattggaatcaaagtaggaagatgtttgatcgaggccttgaggaaattgcgcttgaagcagttgccaaacccagccagcgtctctggatcagaacagatatgtactccgccgcccagcattggtccacagctttccttgatcttgagcgcaacgtcgtcgcccatcttcaggagagcttcttccttgtggggtacattcatgcgctgcatcaggctgcgaacggcggggacaaaggtgttgttgcgcgtccatagatcccagtgggggacggtcggctggcatccaacgtcgcagatttcactctggaatttaccgaagaggtgggctggtcggctaaccagcgcggagacgactttgaagcatgatgtgccgagggctgtaacgggagagaagagcagcacgatcacgaggaagaggcgatcgaggaaaagccgcattgtgtgagatacagaggacgagaggctaaggaagagaagaccgagttcttctgaggtcttccaattgcagttttggtgaagagaagagaagacgtgagatctgattcccccgcatttgtggagaactcggaacttcgtcatttgatgttcacaggtgtttattgcatatatcagcaaatggacttgcatgttagccatgatcctttcaggtatctctcatatcccttgctcaagccatgaaaaccgctgattctaaatctagtgactctatcgagatgcccatacatctacaagaggtggactctctcgaagccattgttatcatcgacaatgagctagatccgctgtcgcccgcagctccgaataccgtccaagtctcggggaatctgggggcaattgccatgggctcaaagcatacactgacagaccgaggagaagcctgcaaggaattgaggctggaagatgtctgctgcgcagcacatggcttgtcgattatggtggtaagatgttctgcattggactcttgaatgcgttctcattaatcctatcttatagactgccacaaaaggaaagaagaagcacgctattctcttcgatgctggtcccgaagaggaggcttgggagagaaatgtgaaacgcctgggaccaaatctctcctctgtggaagtgattcagctatcacattggcatcgagaccactccggttcgttattgaatgaaaagaagcacattcacacatactcctcggttgttctgacattcgctaggtggtcttctgcgagcaatccgcatgataaacaatgccaaacaagccgagagccgctcagagcacctagtcgtggacttgcacccagaccgaccagtctacagaggccttgctctgcccgagcatatcatttccctcgaggctgaccctacctttgaacagattggaagtgcaggaggggtggtcgacaagcggagcgagccacacaccgtccttgatgacttctttctggtctctggggagattccacgagtgacgccgtacgagacaggtctgaagaatgcagtgcgatatgaccctgatgagaatgactggttctctgacgaagtcatcatcgatgagcggtctctcatctgcaatctcaagggtatatgcagcctaaaccctcacaggcttattgggctaaaattttcttaggaaaaggacttgttgtttttactgggtgtagccacgctggcgtagtcaacacgaccaaacacgccgtcgaactcaccggtggaacggtacctgtccatgccgttgtcggtgggtttcatctcgccacaagcgacgcggatcaaatccaaaacacagtagccgatctcaaacggctcgatcccgccgtgctgatgcccggtcattgttcgggctggcgggcgaagtttgctatcgagaaacacatgcccgggtcattggtgccctgcactgtcggctcgagaatcacattctgattccccttgagacggtttcatctgaaactctaatacccattcaaccggttcctgtaggctcgttttccacgtggacgcagggtcttgatgcgaaactgcatggcatgggttgctcgagcaacgagtttcgtcaaggggttatctcggtctcagctcggcataatttgttctgttgacggattccgattactgacataactctattcccttgctgcatttccttgcgatcggaagaatgcggatggatgtagttgactgtttctagactttgattacggagtagtaagcgtgacatgttaggcatacagtgaaggcattgatacttctggctgatttgtagcggcggtttatgatagttgaataatatacgtcggaaatgatcaattcactctggagattctccatcacataaaacattgagaagttcggagctgcataagatttgtagttgaatcgaacctgatatatatttccatgtatccaacgacaattgtatgctagcaacatctatttcctctaagtttatgagacgcggatgtttaaccttgctctaatgatctataatatcttgcatctactgaagaactttcaatatatatgttctacaattaaacaaggcagggtagatgtaacttccatccactacgttatcaagtctccaagagatcagatcatcaaacatcaactattccatgcacgttagttctacgcccacgtcagataagccaaaaagtacctcactacccatccacagcatacggacaggatacagtgtaaccaccagcaacgacaccaagaccacccgacgtcagctggactaatcctccaccgctccgtcgtgcattgttctacagccaagatcccttggtagtaaatatctaccgaatccgtgagatacagcatccaaatatcagcaaaacagtcagtttccgtcttggccgacgaaaatccctcagcggcagagtaagtagtaactagtatagttatcgatcaacatgaacaaatctaaatgcgcccctgacagcgccatgccatgccacgccacgcccctcacagacaacacctccgataagagcacgtcctaagctgtatatctcacattgctacctactgctacctacatactcacgtgcattgctccgttcgtacctagcacggagtacggagcaccccgtacgaagtacatacaagtacaagcatgcacactgcccccgccaagacgcaaccacaacaagcattaccaacaaccacccttgcgctcgtcgactcccctctcctctccaccccgccccacgaatccgatcacggtcgcccgaatcatgacctcacgccgatagaaaaaagggggctggtcagaggccgaatgcctgccaaggcgataatgcgggaggaagggatgcacggcctggcttggcgtcggtggacaggtacgagattagggcgatcagcagatcaagggagggaattttctatgtagattgtctttgatgagccgggggaagatacttgacatcattgaatgactttatcgcgttgtgtgcggagtatagtcggtagtgtagatacgtgccaagagtatatttggatatcgtcggtctttgttctccgagatcgagtgtgggggagacagggataggacgcaatactcaggataattgtgggttgatggcttcggtcgctggtttatcttctctttggggtatctgaatacatgcccaggtgtgatctatactatacaggatccgtatacttccttgggtaggtcaccaagactccgattcatagcgaactatcgatatccaagacaatgagaacaggacgcaagtcgatcccccaccccgttctgacctcagactctcataaataggcaatgcccagcgtccatactacctagccaagaaaccctagtgaaacagagccgtgaaactcgaacataatcgcgcctctccttctgttatcggatcttggcttgtgcctgtctatcgtcgatcatgaagtttaatcccacattagccatcctaatcgcgacgaatgctattgaacagtaacgctgcacgcaggcagcatgtcgatcccctcgcatcccccacgaatctatccctgtcttgcttggcatgcctagacaaggtatcccgggacaagctcgcagtacgcagagggtatacggtacctgtaagacggggaaaaggataacaaaggatactgaaacggtgtctgggctattttgtgcttgactgcgccccctggatttaaaggtagttacagttactggctgatactgataatcggcaatggatggccggggagtttaacggtggctatgcagatgccgacggaggtgtcctgcaaagagagatattccgtagcctagcaggcagtctcacaccgtccttctatgaatagtaacagagaagcaaagcaggcggcaatggcgacaccatccaattcgtctcatagcctccgatctggagaaaattgggatcaaccaggtatcgtgaacaccgccgatcactcgcccgagagacagtgacagtgacagtgacagtgacagccagcccgagacgcaatactgtaacgttaatctttctgtagcagtctgtgtttcaacattatacaacacagccaagaatatcaatacgtcacatacaattattgaccatatacatcgctacagcacggggagaggagcgtgtgcattattattgtggactcgactgttttcccgcagggtagttcgggccacctaccaaaacgcagggagagcaaatctacgaactgggtgtattaccccggagctatactaaagaaggcaataattaggtctgttagagtcatacctatgtcgtagtaacatgcatactttccttgcgtcacaggggaaagggaaaaacaaagcgactgtctttcactgattagttttttcctaatccggaaagacaacacacacctccccgacaccggactcagggcgcgtcgcgctaatggccagcaatactccggagtagtaaatagtgatatgcaaagttcccttgcgaccagtagcaagcgcggaaaatatatcactttgcatgatctccgaaaggcgacttgccagttgtgaggttcgcgtcgagggagtgtggggtgttttgttctcctgtcgatcgctgccggatggggaggacggaggggactctcttagcttgcggtctggcttggaggggaatgatttggtcgattatggggatctagactatggtgattatgtttgctcgacgtggcgtgagtcgtcttatgccgtggatggatggcctgtgtgtttatttattgcttgtttgggtatcgtgcgatagcgacgaggacggagagggtatgtcatcatagctgtcggattcgtgaaaggcttaggggaggtgactccgtgatcacactatcacccggtatcgtatgtttctgtgtgcgatctccacagtccagggccggacttgcggtttttccgacgtgggattccgacgaagagctgtctggccaggatattgaccactgttggattttgctttctcatcggtgcgtagggggcgtgtcggtacctgactactaggatctgatcgacgcagggttgtatgcagccaagagaaatgtagcattagatctcaatataatacaccatattatccgatgcacacgatctagaaatgaactgtgtacacaattcacatgaggctgactggataattctcccactattacctggtggcgcgtaatggattcatccatccgaagtaacagaagaaattacagccctgccaagaactgcacaaagaccctggaactgcgaaccagatgaagcaagcgttcaaagttggcaatgagcaattaaaatccgatatgtaaccatagtcgacgacgcctcacgcccacacaacgctcttcccaaaccgaaatcagacgtgccgagttcccgcgtgccgcgtcggagtttcgacacgggatgcccgactggccgagtctacaccttacaaacgatcatagccaagaccgagaggggaccgacataatgggaaggcgatggtccaatcgtggggcgggaacgagaaacctcaatattcgggggattgtctgcatgaggtaaggcaaatggacaacgccgggcacagacacgcggggctgagggaataatgtacattgtacggagtacggagtacacatagtatgtgctctattgtacgcacggaggacaggtattaattccatggggttgaataatatggagtccaggacggagtatacatcacctacccccgtagcaaaagaagcagcggtgatagtcgttttccaagctctgaccatcctacgccctgggaaaaggaaagacataacgtcatacgtcatacacgattagccgccgagtctgagattaggccaatatcccacgccgacatttttatattgcgattgcgtctaggctgtctaatttccgagcagcaacagcgcatttctcgtttcaaattgcttggagctctcctgcaggtgcgggaaccatatcacgctagaccagaacgggaatcggggtgaggtacgtgcacggtactcccgaggttcggtcttgggcgtattgggggagtgtttttttcgtttcatttcattttccgtgtttttttcatttcggcctttgttttctccatgggtagccgatttctggggtgagcaaatctgggatagcttggcgaacagttagggtagtacttttggtcttggtccttatgcaacatcagcaattcattacgagaatacggagcgctgtgctgtcaaaggacggacctcgcgcacaggcattgaatcccgttctccggagtgactagtcccaaggatgagagtaacaagccttgtcggtgtgaataaaggagctacggagtagaaagaaaatgcctcacgatctgagatcggcaagaaaaccgcggagacctttgtccgtacaagctacgcgacgctagcctccttagtggtaagctatactccgtaatcaaggaacgatgtggcaggcgggcgatcattcagtgggccgcgagggtttgattcagatgagagcttcctgcaagcgtatttcgcgcccgctgattgctggacggagctctggtccccatcgcactattcgcgctactgtaggtacacggctgcgaggcgaaagccaagccggtgctaggagaggtggtcgataccgggccagtagacgcagatgaaaggggatgccaatggaaatcatgtggattcagggatctgggttcgatgatggagggaaattaagaattaagttgtgtgtccccgtcaattcgacatgaccctttcacatgttgactaccgagtagttaacgagtgcgatagactttgctttagggctattattcaatacggcatgtccaagctgaaggacggtcccccgtatttttcatttcagtggaaaattcaccccggtaattacctgactcagcactccctaacgatcatgattggtgggggactggggtaatctcgctactcgggcgttccccgaatcagaaatgcgcttttatggattttcaatggggtatagaagagcatcgggttagtctcaacacaaagcgaaagcggcatgataagaagtcatgacgtgatactgttattcttatcatccatgggctgtcaattcgcattgtgccgacatccgtctattgacaaggataaagcagaggcaagggagggaaaaaggtaaaacgaaaaaaaaagaaaaaaaagaaaaaccacctgcagcaaacctgcattgcatccatgggacggtgacgctcgaaggaagaggaagccttctagaagccatccagaacaccctaaatcgataaccacacgcacctcggatccactccgagaaatgtccaaatggagatgatcaccgactcggcaccgaaacctctctagctcgatccctctagggccagcctgcagtttactctgcacgcagcagttttgatatcggcctcatgcctcaccgtcctttacgacttacgatatccagcaattgatcttcaatttctctctttcgttagtacgcccggttcggtccggcgtgtggcaatcataatcatctgaatgcgaatggacatttgcggcattttgttgcatgacgcaggacaagacacatcacgatcggaaaaacgagaaaaaaagcccgtgcttctcgccgtcagcacgctgaattgatctattgatctccagaccaagcctgcaagcgagacggcagcagcggcgcgatcgcccgacaactgcgaggaatctccgatgtctttgaaggttggtttccgggaatataccttcactaactacatatcgggcttgagacggtggcggcgtcgatgtagagctcatatccgaccgggaagaggtgattcgccacgggcgcatatagatcaatttttatatggagttctccgtacttcgtctccgtacaatcgttattcttggggtgtgtagcttccgttccggtgggatgggcgatcgtggaacgtccatggatgtttcccagcctcccaatatgggcataccgtgaatccccgattacgtctgtgatataattggaactgggtattgggtgcatcatctgtacggagtagcgtgcaaagtacggtactccaggtacaaagtacagtaaagaatagtagaattgactgtcccaagatatattgatatctactatactctcgtacctacggctacggatctcgtcccacaccctcatccatggctcgccgtgggggaaaaaagcagaaaagtcgaaatttgccaaaatcccaattctcgatgcttcggttgccccattcgaggcattttcgcatgttcccattgattgggatacacagctctccactatgcgcctcggttttggggatttggtctgaacggtcctggacccgacagatttttttgaatcagaacaatggcccgatattctggtcctgatccatgaaagaaaaaattcggccagtgacctcggcggcgttgagaacagtcccttctcaggatcgtgcactgctggccttggctgacgtggattttcgaaaggctaaacggcgagaatcccccggaatgatcgcaactcaattggccttttttttccttttttttccttttcccgtttccttttgcgtttttccttcctttctcgcacggggctgcagggggacgaagcgcagactgtccagcgaataggggcttgtagcgggattgccagaactccactggcttcctaaaggagtttggcccatgagctatctgtctctggagctgttcttcgaccgtcgagtatggaggagatgagacaggggctacagagtgacgatagcgggctacggtgaacgggattgtcttgctctctatcttttgcgggataatcaatagctcccacggaggacagttccagaatggaaggtgatcttttctccgatagattatattaccatggcgaggatatggccagaccggggagctccataatttattcgccctttacatgtccgcaattggttcgcgttgtgtcggttcgccttccgcgtaaagcgccgggcaccgttgatgggaagtatacaagacgggaccgacaggattcattatcgcaagccatcgatcgacgtatcgtctctacggatattgtacgatgttcgggagacgagaacgagaacagaaattgtctagatcgcggagactcgcgataatatatcgtttcccgttacctatctccaacggcgcgtgcacgatttcaaccccagccctgaggagattggagattggagatggagatagatggagattggtcttctggggaagacttgccaagggcacattcgccggaaagccggggcgagtgcgggtgcatcaaaagtatgggaaaccagtgactgtacagaatatgtacagactccgtcctgggctgctccatcctaactatcatatacatttcctacatcctgattcgaaaccctgtctccatccaatcgcagtcagccttattctattgtatgcaccgcgaagcttgacggtgtcgatggagggtctgatcgtggaccatctccagtaatatacatccgatgacccctgctatgtacatatgctttcgaggatttacccgcactcgggcaacccgcatttgccatcgtgaactaggtttgtgattgaattttccgttttggccatgtacacaaggcgatcaatgtatgtatgtgctggccggataataatagtagtctccgattgaagcgacgacggacggagtatagtgaactttatcgatgccgtcttttctcgattgagatctacaatatatcacattatacgagcaaacaagattgccactgagataccttgaagcattccgctgaactccgtataaacacccatgttaagagtcagtgcttgggaacagcgtcggcgatcaacaatgatgaaatcatcggccggcgtctgcacacggtgattcgatcaaagccttagtgtagctgttagtgggcctacatggtactgctggccaatccggagcaccgaattaaatgccgcttctggggacgctctccacgaggccagggggaaagagagggcgacgatcgaccgtggtcagagggacgaacgaggcagctgcagcgagggcagtggcagtaggacacggcagtgcgtgctgataccagcagctgaaaaagaaggcggggaagttcgacattagctaattgatgacataatggtaaggtacagcgcaggcgtaatccgtgggtaagaaacgggtaattttcaacatgcttcaacctcacaacattggcatatccagatctgtcaaccgtttccggaccccttgctatgttaaaatcccatgcgattttggcgtcatcacagtcacagtggcattttttcgttaccttgtgcgtttagtgtttacgggcgaaagccggactcggtcggcaagtcactgaagtatatacatatgtcgctagccctgacatgggcaaatgaaggcatatccgtatcaatagactatcttgggactatctcgggctatgtcgctaaatagagaaacattctcctgcaagggcattcctgctctattcctttttgccaaggccgtgaattctccgtgaaaacacacctaacctgcgcggtatcagaactggtcgtagtgtgtcttttttgctgctatgcttggggtcgcggggcacaccccagacacaaaaatcgcgcatagtgtcaggacccggggcagagacttgcgtaaaattgtgtaccgattttatacgaaagtgatgtctgtggacgccaactcggcagcgcggtgccggtagcagagacctctagagtgagagtcgtatcggtatcgcgtttttgcattgttttgatgctaatccgaaggcggttcctgacccactttctcgaccgcggctgcaatgtgactggctgcagctggctttagctggctttccggtaccaggtttcttggtagggcaaggggtaaatcttggtatcgaccgagattcattacagggctaaccctaaacgggcaggaaaagtggaaagaaaacagaaaaaagtctaattattcccaaaagaatggcccatgagcaggtcgagcagtacctagcttatagcttccccagcaaccaaatccacaggtatctctcccctcaaattgacaaacgcgggatttcgtgcaaatacctctctccccatttattttttatttcttttattttttaattcccaattttgcaaattcaattcccaaattcttttttctttttattttttttattttttaatttccctcactcttttctctcattatccacctacccactccggttttgacccccccgtaatccattataaaacagcccttccttcacccatctcattttcttcctttcctctctttacataggatctattccgactctgtcatatcgccattccgttgttctttctcatatcgttgggttccaaggctgtgtgagccgaaagcaacaacaatggcggagcggagaatttcctatgctgttgatgtcgaaaatggtggtgagcatcgcacccgtgaggctgatgatggcaatctcgacgagtactctgctttgaaccgatacatctccactgcccaaaacaaccgtcgtggctcgacctccagcgccgctggtaagagcggcgatgactccgagaagaagaagccctggtggaagttcggtggcaaggtcgtgggaggtgtcgaggaaggtttcgttacccccgatgactggctcgagaccgacctgcgcgctggtctcagcagcagcgacatcgagcctcgtcgcaagaagatcggctggaacgagctggtgactgagaagaccaacatcttccttcagttcctgggttacttccaaggtcctattctttatggtaagtgacctggacttccgtcttcaggacgcgtttccagccaatcagcccactaacgccttgctctcccacagttatggaacttgctgtctgtctcgctgccggtctgcgtgactggatcgatctcggtgttatctgtggtattcttttgcttaacgctctcgtcggttggtaccaggagaagcaggctgccgatgtcgtggcttctctgaagggtgatattgctatgcgtgctctcgttatccgtgacggccatgaggaggagattctcgctcgtgagctcgttgctggtgatattgttatcgtcgaggagggtaccgttatccctgccgatgtccgcctgatctgtgactacaccaagcccgagatgttcgagacctacaaggaatacctcgccaacaccaactccgacgacctcaaggagaagcacggtgacgatgaggatgatgatattgagacccaccagggtccctccctcattgcttgtgatcagtccgctatcactggtgaatccctcgctgtcgacaagtacatggccgatgtctgttactacaccaccggttgcaagcgcggcaaggcctacggtattgtcactgctactgctcgtcactccttcgtcggtaagaccgccgccctggtccagggtgccaacgacactggtcacttcaaggctgtcatggacaacatcggtaccactttgctcgttctcgtcatgttctggattctcgccgcctggattggtggtttcttccgtcacttgaagattgctacccccgaggacaacgacaacaacctgctccactacactttgattctcctgattatcggtgtccccgtcggtctccccgttgttaccaccaccaccctcgctgtcggtgccgcctacctcgccgagcagaaggctattgtccagaagctcactgctatcgagtccctcgctggtgtcgatattctctgctctgacaagaccggtactctcactgccaaccagctttccatccgtgagccctacgtctccgagggtgtcgatgtcaactggatgatggccgtcgccgctattgcctcttcccacaacatcaagaacctcgaccccattgataaggttaccgtcctcactctccgccgttaccccaaggcccgtgagatcctctcccgcaactggatcaccgagaagtacactcccttcgaccccgtctccaagcgtatcaccactatctgtacttgcgatggtgtccgttacgtttgcgccaagggtgccccccgtgctattctcgccatgtccgactgctcccccgaggaggccaagctctaccgtgagaaggtcaccgagttcgcccgccgtggtttccgttcccttggtgtcgccgtccagaaggagggtgagccctggcagcttctgggcatgtaccccatgttcgatcccccccgtgaggataccgcccacaccatcgctgaggcccaggtcctcggtctctccgttaagatgcttactggtgacgctatctccatcgccaaggagacttgcaagatgcttgccctcggtaccaaggtttacaactctgagcgtctgatccacggtggtctcgctggttccgcccagcacgaccttgtcgagaaggctgatggtttcgctgaggtgttccccgagcacaagtaccaggtcgtcgagatgttgcagcagcgtggtcacttgattgccatgactggtgacggtgttaacgatgctccctccctcaagaaggccgattgtggtattgccgtcgaaggttccactgaggctgcccaggctgccgccgatattgtcttcctcgcccccggtctctccaccatcgtcgatgctatcaagttggcccgccagattttccagcgtatgaaggcttacatccagtaccgtatcgctctgtgtctccacctcgagatctacctcgttacctccatgatcatcatcaacgagactgtcgactcctccctggttgtcttcatcgccctgttcgctgatcttgccaccattgccgttgcttacgataacgctcacttcgaggcccgccccgtcgagtggcagttgcccaagatctgggttatctccgttgttcttggattcctcctcgctgccgctacctggatcatccgtggtaccctcttcctcaagaacggtggtatcatccagaacttcggttctccccaggaaattctcttcctcgagatcgccctcactgagaactggctcatcttcgttacccgtggtgctaagacatggccctcgtggcagttggttattgccatcttcatcgtcgatgtcctctctaccttgttctgtgtcttcggctggctcgcacccgactggaagcagacctcccccgtcgatgccggcggtcctggcttctcccacaacaacgatgtcgacattgtcaccgtcgttgtcatctggggctactccatcggtgtgactatcatcatcgccgttgtgtactacctcctgaccatcgttcccgctcttgacaaccttggccgcaagacccgctccaaggccgacaccaagatcgagaacatgatcgcccacctttccaagcttgccatcgagatggagcgcgacgcggaaggaaagactcgttacaccatcggtgctcgcgccgaggagatcgaggacaacgagtaaacgctcgtcccttagcttttttgcaactcgttactgattcgaggtctaatttctctttttatctccctgcgattacccgcaaattttgccgtgccacctaattgaacatgcatgccgtgggagtcaagaaggtcgagttccgacttttttcgcttccttttacccgtattatagactttgtgtgtttcatttacccccctggctgtggtttgctttcgagttgctagagtcatgtttttattctctacgtgtatgtatgtcgttaatagtggcacttagtcaatctaaagggattctaatcatttctgttctactgtaatctcgtaacctttcgtctgatctttttttgttatgctttcgtctgatcttgtcgcctattgtttgtctttggtctcgactctcccagtctcataggtggaagtaattctccgttccccatattttccccggatgaattcctggagacaagcttcaccgtctctttgcatcatgcatgaagtattgagaagtaccacaaacactcgacttcctactttcaccggattctcacctatcctggcactagtctcgctcaatatgaatctctaattttccgtctcatgcaactagctacgcatctataaactccactccaaatgccttattagaacaaccgtagatcgtgcccatcggaagtaaacaatcacccacacaaccacgatgctcccatacatcctctccctactgtgtctcctcctccacacccaaggagccaccaccacccccatccaccccatcaccagacaaacctgccaatccaccggccactgtccaccaggaaccctaatcgtcagccgaacccccaaccacaaaaacaccacgcacccaaccctccaatccgccataaactccctccccaacgacaacaccccacaaacaatcctcctcctagcaggcacctacatcgaacaagtaaacataacccgcccaggcccactaaccctcctgggcgaaacaagcaaccccagagacgcatcccgcaaccgcgtgcgcataacctgggccgccgccaacagcgacagcaccggcgccgtcgacaacgtcttctccagcgtgctggtcgtagcgcccacgctcgaggctagcctcacgggcacgggcccgacggggtatcccgtgccggcggacacgccgtttgggaatacggatttccgcgtgtataatgttgactttgagaatacttgggcggagtactctgatgggccggcgcatgcgttgagtcttagtcgggctaatggggggttttattactgtgggttttattcgtatcaggatacggtgcgttttagcttctttctaactgtgcttttggtcttattgttgagattattattcgttattcgttgggagtgcactattctcacaccaacactaacccccacaggtctacataggcaaactaggcaacgcctacttctaccaaagcatcctagccggccaaaccgacttcctctacggcttcggcacagcctggattcaatccagcgcgctccagctgcgcggctgcggcggcggcataaccgcctggaagggcacgaacaccacaaccccgaacaagtacggcgtgtacatagtcgactcgagcgtgcgcgccgcgaatgcctccgtagcgactgatatccagggcgcgtgtgcgctcggccggccgtggaatagccagcaccggtcgatctttgcgcgctgttatgaggacggcagtgttgatccgcgcgggtatgttgattgggttgttggtggtgttgggcgcttcgaggagggcgttacgcttatggcggagtatcgggattttgggcctggggttaatgtgactggacgggttgaggggggtgttacttctgatcttggattggggggttgggaggcgtatagtactccgctgaaggtttttggggatgtggagtgggttgattggggggttgttagggggactgattgagttcgatgggtcttgttggtactagtgagtagtgagattcctgttaaacagtgcttgcttcacttctacatcctaatcgtaccaggctcctggcgcatctccccaatagccttcccctccgacgtcccataagtatcagcatacctccccgccatccactcgtgaacggtaatcgggggatatttaccaccctctgatgtacctgtatctgtatcctcacacccaggaagacaccggatagtatagtttggattccccgagaaaaagaacggaacactaaagcgctccttgccactggtattaatcacgcggtgcagattcgacaagtaccgatcattcgtccagcgcatcatcatattccccagattgacaacatacgccccagggaccggggtgacatcgacccattcagacgagaggttattccagacctgcagcccgcccgtcccatcctgcatgagcatggtgatagcgccgaaatcggtatgcgcgccgattcctagagtcgacttgttagtccgtattgcttgacgaattcacatcctaacacaagttcactaacctctctccagatccgacgcatcatcctcctggggcggataccgaagcagtctaagaatagagacggggtgatcacagaaatcaccaaaagcatgctcgtctagaccgagcgtgcgcgcgagaacttgcatgatggctacagccagctcgatcatcgcgtcgtggtactcgtccatgacgcggcgaaagccttgagcgtcggccacttcggagggatacttattcggtccgtggccgaagcggcgctggacgacgtatgggtcgtttagggggaggtctttgccgagatagaagccttctttgaggtcgccttttgtgcgtttttcgaagttttgggagcggaggcactcgtagccgcggttgaagccgccgatggctgggggtttagtttctactgccatttgatggagttgggagaggctgtattaccttggttgtatttctcttttgtttctaaggggaggttgaagaattcgtttgagtgttgtaggactgcggcttggagttcggttgggatggcgtggttgattagctggaagaagccgaattgttcgcatgcttgttggatttggtggatgaggtcttctttggttgagtcgttggcgtagaaggctattgaggggttaggtattctcggcatataggatgctaagggcacttattacgggcgaaatcaatgattgggggttcgttaggcttcatcttggaggtagttaggtgtaggaagtgagactttaaagtcttttatagctgtttatacctgatcttggtcttatatcttcgaaatgcggggaattcgttatctcttcactcaattttgtacatgtactttacctatctgtcggaaatccccgctcctgtgcaatgtctgaagggatttttatggctcgggatggtggaaaactgtcggagaagggtctcacagccgctacgtatgtttagtctgcatggttgacctgatcgaattgctagagagatggagaagataagacaaaaaactgtacggtacatgcatgtgtagtacaataaaactcaagggtccgaaagaaccccgagagggaacaatgggtatcatattcgctctaatcaaatgctaaaaatgcacgggcttccactcctgtccgggataggacgtgggggacatgacgatctcctcactggagcggtctgcggtgatggcaagctctactggctgaggtgggttgttgactacacggacccggtcctcactgcgatgaggatgcgcggatatcgcgtctgagatggcgatgttgcgggatgcatggttgtccaaggccgggaataccgagtatgtaaccgctggcttttgggattgaatgctgagccgaggagccaggctttgttggttggaattgcctggtaattcgtgttgttgcccgtggtttgacgcctcggatatatccccgtatagttcgtgtcgaaggggccccccatgaatgtgctccttgtcttcctcatcgtcccgctgctcttggttttggtcttgggtgccttgcttgtgctgctcctctccctgcagttgatgtatttggtggtctggtaactcctccaacggtgactgtggacgtggaactctatcctcgtagaatgacctgggagacggtgaccgggaatgacttgggagaggcgggccgagtgtgccagcagggtgagaccccggggattcattcatggatttaggttgaaactgcgagtaaaaccgactggtcgccagagaggatgacaagctgggtgggcgtggagtcggcaaaggcttttggtcaaatggattgctgaggaccggtggtccatcctgtgtagcgagactagtattcacatttccacttggcgacgggtgcgtcggcgagtatttgttcttcagctgctccgacatggttcttgtgtggtctctcgattttctctcagggtcgtgggagtcttgccggccaaatagtccctgtttaagtcagaaaaaggaaacaaaagaactgtccaagttgacatacgctaattctgctgaaccgtttccgctgacctcccgggggcgcctgaggcccttgcggttgaataccagagaggagatctcccacagaagcgcgtcgtcgtctcccaaagtccttcagttttccaatagtagatcccccattctctgcaggagatcccgatcttgaagcttgtgaaagaccgttagcaggtgtggacgggcgagtgcctttgctattggcgctgcgctttccgaagctaccaaagctcagcatactgcttcggtttgccggcgagtatctgacttcatttctcaaggggctttgcacatctggagcagatggaggtgggccgttgatagattttcttttggcttcgagaacctcagcagaacttgcgaaccccgacgaatagaaaggtatgaaagaccttctcttcacttgaacagatggctggtcatccacagaatgctcaaccggtttataccggggttctggggttacctcgtttgctgcatcttgcaaaggagaagggggatccctgtcaagttcttcgtcagatgtacgtccggcttgctcgtcagctccgagtgtggagacggagggatggcgtctataatcctggctaggtgcaagcccattatcattgtccttgggaggaggtggaggaggttgaggactttcatcaagcactggacggatcgacggggtaataatctccggtgtggacttgcttggctgatgcccccggcggttcgtaaacgggaaaggtacgtgaaaaggctcattgggaatgactggcaaacgattttctacgactggggctttgttcgacagcacggattgattgccagttgggatctctcctggttgcggtattggctgtgtgaattgacgtttcccgccatttacctggctaaatgcattcaacgacatcggtgtacttgccgcccttcggtggtgaggatctgtaggcgaaagaccaagcgcggctatcatctcctgctctaactctccagtaaaggcagacttccccggaacttcaggtctaggagggacaccgctggaagaggacacttgcttcggttgcacagctgtctcgctaacacggttgtacgacgggtagttttcccccgacttggtcgctttgacaggttcgctggaattgtgttcatcctgtcgatctagacagaaactgacccccggtggatcaggatcagagctgagctcggttcgctcagatttgaacatgggtagactgccaatggcgacagaattccgcagagaagagttaccagacacctcacccggccttgaagggaaggataagtgaaagctgcggcgggaagcacttggagttgactgaacctacaacattaccaacatcagaatgtaaacaaacaggggcggaatgttagattgtagcaaggaaagacgcatcaatcgtgtctcattctagagctcaatgcgaaaggtgcgcggaattacatcgtggtatccagaaaatgaagcagcgcagcgatatcgaaagggaaacattaaagcgacggcctccaccgtgcttacccaaataaacgactcgctcaaacgaaaaaaaaaaaaaaatcaggcatctaccttctcagaactgccactgggtcggaacctgcttctgcccttagcaaacagccccttggctgctccggtagccttgccactaaacgctcccgcagtatgaaggagctcctttcctttctccccgactttctccttgttcatcacggtacccaggtggcctgacggacgtcggatatgggtgacactagttggagcaccgtcattcaaggaaccgagacccccaagagcacctagcttagggaatctgatgcgcgaagggtctggcacggtaggggagagattctggctctgttggaccacgtcggcatactctgggtgatcatgaaccataaactctagccaatgattcaaaccagtatcaacggtggcgaactggtcgcgggtgtgttcgaaagacttgatacgctggttgatagatgtgataccgatgatttcacggaaacccaaaagtttggattcatcaaaggatgagctgccggcgttagaagagatatggaggggcggaggtggcgtagctcctggccccatgatttgctccggtggtgtaatgttctgcggaacaggtggaacaatcgaaagtcgaggcctttctacagcacgctgagtagttccttcttcatcagaagcaagcgggtcgtgcggcacatccgacaagaagacgggctcctcacttatcggctcaggctcttgcatagataacgatgtgtctaaaggaggaggcgacgaatagccgccgggcatttgaggcgcctgtatttctgccgaatcagaggattcccacgaaaaccgtctttctaatttgggcttctttagcggatcaacgttcgtgccatccgcgccttgactggtcgcataagggtcttgagacaccgaaggagccaggttagtccagtctggctggctttcggaaaacaactcagcgggtgcctgcgattgaggttggttgctgggcgggtcctccgagggggtggcttcccgacttaatgatcggataatctcctccctcaagcgatcattgtcggtattctggggcgattcctcggctcccatgatggtggggatttcgccatggaaggcgtcagagcccgatgcgcttccgaatttgagaggggcaggcatatcctgcccattgttcgagtatgattgcatcagtgcgttcggaggagagattccctcatcagatgattctggtgagagattctggagtagaggaatggaggataattctgcacggcccgccgttggggtgtcctggtctgtgaattggggcttcctcgaaggactgttgtctgaactaggaaggctcaggtcccggcgatgacctaggtttaacgctggaaccgcattggcagttgccttcggggagtttgactcattcggttcctcgagaatggtaggtgttctttcatcagtcatagtacgactgcccatgatagggctgatcgtcgaagtgccatcgctgttcgaccgtgtgaaactagtggcggtagattgtggagtttctgggacatcaaaggcctgattcactaccgatcggaatcccgtggaggagttgtgatgcaaatagggctcctgagatgcagagctatccttcggcgggttggagtctgcaccacccaagaaatcggtaccaaagctagatacgcgcttgacttccggtagacccaaatcgagcttttgttgatctgtttgaggtggaactccaaacccgtcaggcttgggatcattgctaccagtgataggatactgctgtgcggctttctcctcgcgcatgcgtttatagaggtcggccggccttacaaagggcagggccttttggtctcctccactaagattcctacctttgttatcagccaagtgcgactcgccagctccgagtccgatgctagacaaacgcctcgaggacaactcggatgagctgccagtgttgcgggtgacatagggcggccgatgtactacaggaggcgcctcctcctcttcatcgtcgtcgtcgtcgctaccccagtcacctccatcataagaatattgcttcgcttccacccagcgttttgttttggagcggttcacgtttgtttggaatgagatcggggttccgctgcctgacgagagcggactgagcacagttggcggggaagggctaaagcaggtcttagtatttgagaactagatatgcgactagatttggataaatggtcttacagttttggggctccatggccctgcgattgggttgggtctgccattagggaacaggatcaaggtactgagtcgcgcgcgatcaccagcatcgactgttgcctggtggtctctgataattttgcgcaagagaaaattgtaagtgttagagaagaatgtgagcagcaacgttctcttaatgatgtgtatggggagagaaaggtggcgatttggcccaagttgggcaagcaccaatcaaataggttgggacaattggatgaaacaagatgtacaagaatgacgtgtatccacagcggaacacaagatcaagccagctatatcaagaagaatagaatagcattagtatcatgaaacgagctaagttgtatattccccctgatctaacgacgtcaaagggctgaattcgggtggcggtgcggggcttatgtaacgcgtttcggattccaaggtttagttacgtggacgaacggggctcattgcgacaagtcgaccttgtggacctcgttggccttgaccctccatcttcttacttgactgtacggagtatatccggtctgctttgttcctggattcaagtcacgttgtacctcggagctctttacctgcaaccggacacgtcttcacctcgccccccttatcgattgcagatagatcacatttcagttccaaaaccgagttcggcctttgtcgacattaatttacatttgcttctcaatactggtgcttcttgaaagactatagctactagtctcccacgcttcacatcttccacatcgcacaatgaccggcccgtcgatacaagacaggaccagcgagttcagcgcgatcttgggccacgcccagaagcgcctggggacatcgaaagttggttcgcagcgccaggcattgttgactgatgcgcaaaggcgacaagccaatgtgtcgccccaaggtcccgtacaggaggcgaaggcggcaaggtcggagttcgcacggcgggcgcgagatatcggaagggggataactggaacaatggcaaaattgcagcgattggctgaatgtaagtctggtcacgtcgctcaaaatgccagcaatctaacgaggaaacagtggcgaagcggaaaacactcttcgacgaccgacctgtcgagatctccgaattgacatacgtgattaagcaagaccttgccgctttaaaccaaaacattgcctcgctgcaggcgctcacccaagcgcaacaccccaaatcgaatcgctcgaagacagaccaggagggagaacacaatgacaatgtgagtgaggcatgggaaaggccgcgcacggacaattcgctgattacccatttcaggttgttgttatgctgcagggaaagctggccgatgtaggcgctagtttcaaagaggtactggaagtccgcacgaagaatattcaagcatcccgaactcgaaccgagaacttcgtttcctcggtatcatccaaatcacacagcgccctcgacgcacagcgctcagactcgcctttgtataacaccgcgggacgacggacacctcagcccggatatcaaggcaactcctccgaccttttgaccctcgagccctcaaacccttcgccattggggcgtccgtccttccaatcagatcaacaactgatggtaatggaagaaggagaatcgagtaatacatatgttcaagctcgaggcgaagccatcgaagccattgagcgaactatcagcgaattgggtggcatttttggtcagctggcgcagatggttagcgaacagtcagaaatgattcaacgcatagatgccaataccgaagatgtggtcgacaacgtccagggagcacagagagaactaatgaagtattggacgcgtgtctccggcaatcgctggctcattgccaaaatgtttggtattctgatggtatgttcactcaataaatttcttgtctgctcatactaatgaccgttctagattttcttccttctctgggtcctgatttcgtgatagacatgatatctgcccttttttcatgctgtactataatatctggcccgtgtgtttcgacagatcatggcctttctgcatatctgcactcgctgagcattttcatgtcttttactgcctggctagactctgggatgtctaattcatcacgctctttatcttcgtttctacttttttctgtgccctgtgctctttgttgcttgggactgtgtcctcatgagccacacgcgtaaatacacctcaagtactatttgaattcaatgaaccgagatcatgcgataaccatgaatcacttctacattttgaagccagtattcattctatttatatcacgcatcaaactgcgtcatcacattccacagttccgactccgcccaccccaacgagggctgattatcgaacaattcccacacaagactgtcatcccatccccccacagacggtggcgcagtgagttctccagtggaatctgcacccccaagactgacaaaagccggagggttattgtcagcacggccaaatatatctgtgtaggacgcaatattgccctcggtgtttccagctgtgttcgcttcagggagtgcagcttttggctgttctaagcgggaaggttcggggttccctttgaccaaaggtgcacacaggtccaaaaatttggagaatagcttgtacagcttgccgatcgaggcattcgcctctgcgaattgatgtaggtctccggtgatgtttttgatcatattgaagtctttctcgtttgatgttgcgatcacattgcagaacaggacaaagaacggtgctagaggaaatagcagcattgtcctgttaaagggtcattagtttcgattgtaaggtattgaaagtggctttaaaatagctatatcataccaggtaagaaagtatggataggaatcgatagaattgatgcgacttgagcatgcttcctgtaaagctcggagagtggagagggcttctcgggctgtgtacagacagttctcgcaaaccaggcgagacttgagtaccgaggagcgggcttggatgatggtcgtgagaatagagtagtagttgaagtcaattgatagccattcgcgccgcagatggctccatgattgtgggaattgctgttcttggtgacgacgagactgaaaattgggttagcggttatgctggcggatccttgatttctcttactgtttgcatattggagtggattatttgtgcccgcgccacaagatcagacagtatattggccttctccgtgtctccagttgtcttgttatcgagcaatatgtacagtagagtattcttcagctctgaatactccactatgcctgtcatcatagtagatgttggtaggtcagggtcgatgtggatcaacttggttggtttgactttcagatcaggtagagacggtggtcggaggagcaggaggctgagtgttttgtcgaagtagtagcacatgtacacactagcgtgaatattttcctctatctgacctcgaggactggtatctgtgatgttgtgatagttcaaggaaacaatcatccgtgacgctagtgctgtcaacatccagcagcgtgtcatgtctcctaaatattgcatcaaacgggtctgtcgtgagtcagaaatgagtcaatgtatataaagccacgtggaagagacaggagaaacatactgcagacagaaccgattgaagcaaaagaagactaggttcagctgcgagcggaatttgattcaaaatctctgtggcagctacttcatacctcttcttgagtgaccgaaaatgattcctcaaaggctcgcttataatgagaggggccatttttgatatacaaatcatggccttcacccagacaatgatccggtaatgctggagcacttgctcacattctgtgccctcgataattgcaaggcccatttgctctagtactttgtcggagatgtgatcaggccaattgattgttccctgagagttggttttcttatcgggtcctatgatgatcagtatcactgacatctgacccattctcgaaacttaccaggtagcatcatgtagagcaattccggtgtgagagtaggtggttgtatggtttcttgaacatccatatcaggcatagccgcagtctcctcccaatatagagtcggattggatagctgactgacgaacttgcgcgctgattcaagtgccgtgcgtctatctttcgacagagcagggttgcattggagttcatgctcaatgtactctctagcctcactcgcgtgatgtgttgagccaggagaatgtgcctggtgcgccacactctgagacttgcggtgcttacttggtggtgcctgcagggcagctgtgtcatggggctcatatgctcgatatcgcttctgattgtcgttgagaacttcagtattacttgttaggttgcccgaaggcgaagaagacgttgtgctagtggcgtaattccttgctggaaagtatattgcctctttattgcttgactcttctagcctcgccaacctttgggacaatgtctccaatcttgaaatgtcagctatagattttaaagacgcgcatcgtgaattgcacgtaccgagagacccgtggtctatgaactcgtgcctggcgattgcggagacattctgcacctgcatcggtacagttcatgcaagggtcctggcgatcgcatttcacctactccatacaatgacccgagataagcatctgtcaaagaatcatatgtgaaaaacgaatggttataccttccgagtatgacataaatcgcactggtagccgattagctgagctacattatgtttgttttagaaacagcctatgcctttcgcgacgacattattcaggcaaacttaccgcagacatattgatctcggaactcgcaacggaatttcggaatcaaggtatattaattaagcactgggggagagaaaggtgtcggttgaagttgtgtgctcggcgcccgaactgccgggaaccgagcggaagcggtttagcgcggagcttcatctcacaggcgcgatatattttcttattagtattatagctagaaggataagaggaactaattgtatagtatatccaagagtatatccaaggcgaaaggagtataaaatgtgatttacaatttgcattgaagacttttgtactattccaagctatcattcgtcataacaatcatagcaatattcacattccaatctcacaatggacccgtggagaacgtgcaattctgagtcctgaacggtatgcggaatagcccctcgtcggtccatctcattttgtgctgcttggaaccatatatggtttatttttggctcgaggtctgattgttcgccatgatcaccgagagacgcattgtactcgttcagatcccatcgcatcgcccacagaaactcctttctatgagaccacgtggaatcatgctcgccctttctttttctttggttatccttcgcgatggaaacaaagaagctaacgattctctccatggtggaagtggtgagaaggagactaaaccagcttttcgcggaggaatgggggatttccgggcccatcaagcgctggaccgtcgaaaatagaagttgcatgcagtggtgggtcgacagaaatatatgtgtatcgtcaaaaggcgcattacggagaattgattgctgtctttcaatagaagatgccatatttttgtggcgatgacccgagtgatcagagtcagagtctgaagatgcggatgattctaagaagaatactgcgtaggctctatattcgagttagtaagcttccaagaaatagtacagtggggccatacatcggatacaaaagcttggcctggagcgaggctacagctttactgtagacaacttctttctctgtttgggaagacgaccacaaatgctgcgcaattgtactggtctccagatgatgtgcgaccacatgatcagccaggtggtgggagagtcggatgcaagtattccagcatcgtttcagatcgccgagataccccagagaataactagcattgtcatgagccacgcctttgctataatgaggaggtggcgggggaaatagctcggagacgaaggcaatatcatcacccggcgacaggctgccatcaatacaatggcctggatgcttctgttttcggagttgaatatatgcccatgctatggcaaattccagcttagaaacccggccatggagcgctcgacaggaaagagacaaagacccaatatccttcagatcacaggatgctaggatcataacaaagatatgagatgggagccgctcccatcccgaagctttggacgctttcgacccagctgacatcgagccccgtttaccccttcgaaggaccgttcggactcgatggataaaatgcgtatgtgtcatagttcatacttttggtgaattatttgagatattctttcatgtacctccgaaatctttgagatgaaaccgtaaataagacaaatggatgatagaaacttagatggaatggcttcagctgtgatttgagtgtgcccagactgtaaagacgcagttaaaggaccgaacagagtactgcaaaaacaccatttgatcctttcgagcgaagatgtggagtttgaaacaaccgagattgggatgatgccggtgatgtggacctcatgccttatattcaaggcatcaggatctcacggacatctgccttcccgatccttgtcctttcctctcctcaataccaccagagatcaaattgcttaatcaagcatgctagtcatcaatgtctagctgggttgttttccaaagagagctgcagcgatggtttgtctaactagctccttggatggtggccgggcaatggactcgccatccaaacaacccgcatcgttcgcatgcgtggtctgtcacgatcggaaggtcaaatgcgataaacaagacgcatgtagtccctgctcaaattgcgccaaggcgaatgtggagtgcatctaccgtgctccaccaccgcctcgtcgcaaaagggaccgagggacaaatgaaagtatgtctcaaggacgcggaaaataccttagacgcaacacggaattcgaaagaaatccatcattcactcagaatcatcatgattctgcggagggaaagcaacggattgaagcagggaaaagtggatctgggaggatgatcacgaaagatggcaattccatctatctcgacacgtgagttgctttgcgctgcatttgacctaatgtcaaagttgaagttctgacttgcacatcagcgatctttggaccagtgttagtaatgaggttagtattttctgactgccgcgtgctgtcgatgctgaccatctttgctagctcccaaatgcagcggacgtattgggggatggatcggatggtggtaccgatgacttttcccaggatgtgagcgacgattatgcgatactatcgacatctgcaaaaagagacattctcatagaactccacccaagccccctgaatatcttcaagttgtggcaggcatttctcgagaatgtgaacccactcaccaaaattatacatgccccaactgtgcaacaacaaattttggacgccatgagtgatctaccaggagtaagccgggaggtcgaagcattgatgttcgcaatatactgcatatcgttgatttccttgcaagcagaagatgtcgagaagtcattcggagaaagcaagaaagccctcctatcaaggtgcagacgaggagcgcaactcgccttcaagaatgcatcgcttcttcgcacatcaagctcagtggttctccaggcgttcatgctatatttagtatgtctacatttcttgagatctaatccctttctaacgatgtttagctctgcatgcgctcgttctctgacccacatactgtctggacattatgtggcattgcagtaagaatcgcgcaacgaattgggattcaccgtgacggggctgcacacggactttcagtattcgaaaccgagatgcgtcgtcgcatctggttccagctcatgatcatagatggcacatctgcacagttctgtggtgtagcagcatcgccgctcccaaccacaatcgatgtccaaccaccaatgaatgcaaatgatagtgacctcgatcctcgcatgacagagccagcctatgagaagccaggaccgacagaaatgatgttcgttctggctcggagtgcatttggaaaatggctctttcgtgtgtcaagccaggctgagaattctaatactgggccatgggccttcttatcatcgtcatcgatgcccttgaaggacaaggataaagcaattgatagactggaagcacacatggaagatacgttctttcgacactgcgataaatccatcccgctacatatagcaacgacaatgatggcgcgttcagctatatactatacccggctgatggcacaccatcctcgtctatacaaggatcccaacaacatctcccaggcagagagaaggatcatcatcgagaattccctcaagatgatagagtatgctgactacgcccaaaacaatccagtcgtacggaaatactcgtggcacatggtgaatcacatgccatgggacgccatcatattcatgctcacggggatgcggcactggactgattccgaggagaaagacaaagtctggcaattgattggaaatgtgtactctgggcatattggaacgatgggcaagaacgccccaacacctcttcacatggccattgagaatttaattgtcaagacctggcggaagtacattgacgagtgtaacctcaaccaccgcacaccaacgccttgtccaaccatcgttgaatccttgctagccaaagcagcaggaatttctagtttgcaacagaaagatgaaaacttagaagctgtcgagcgaggtgttagaccacaagatcaatccaggcacgaccgttctagttcacaatttggactagatgccgaaaacttcgacttcctgcttgatgatggcccgaagacttggaatgattgggacaatcttctcggcaacttcgaaggttcttttgcagatgatgcaacatatttgtcgtgacatacgacgctgattgctcaaagttcgtacacccaccatttctagcgaatcaagatgtatggcagcaatcatcgtattcgaaatccaggtggaccccaagttggagagtcttgcgtgccaaggtacaccgagcatatagtaaatgcgatattttacgaccttatgtctcaacagccaacgctgttattttatttctgtacttgtcgatagctattgataagcatttttagtaatatatctcaatttctaataaataagaaaatgtaatgttatagtcaaaatatatgtacgatgctatgagctaagaatatatatatcctcatcactacacagttcattcaagtttccgaattccataaagtggatagatataatatgaaaagcattagtccacaagaaaaagtcaataatagctacatgtagatagttagtgggtgttgcgatatcatcttagcattactatgtcttagtgtctagctcgcatgtgagatacgtcatatgaaaagcttcattttcacctgctaagttgaactaggtaactattgactactccgtagttaacaagttcgataacagtttgcttattaagtctctgatttggagtcccagtctaagatcatcttgaaaacgaggcgctggtcggtatacatcttcgaactcgcgccgatcggcatgcgacgctccgatgcctccacgtgtcttggcgtctgcgatcctcggggtcggcgactaaacagccgaccagcgatgatcatcaacattttttggagtcatgtctttacacagcgctggtatgtgcttgatcaaatttctatttaaagtcgcgttccgcgcggtgccgattttgaatatgactaccaatttcccacctgcaatcgcctgagcacggtattctgccatcaattccacctacaaaacccccaaagatcgttccaagatgaaacccaaaacggatgttctcattgttggcgcaggcccaactggccttgtccttgctctgtggcttcaccatcaaggtgtcaatgtccacattttcgaccaggcggaggccccggcgcagaactcccgagcgatcattgtccatgcgcgcatagtcgagctgtatagacaacttggattgagcgaagacttgctgaaacttgggtacaagctgccggccacgaatctctgggtttataggcagcgcaaagcgcacgtcccgctggaagacttcggtcgcgatttgactccgtacccgttcatgctcagcgtaccgcaagacgaccacgaaaggatgctcgaaaagcgactgaatgacgtgggcatccatgtcgagcgagggtcgaagttgcaaggctttgtggaccacgggtctagcatcactgccaccttgttccgcgaatctgatggcagctcaaccacacacgaagcatcgtacatagtgggctgtgatggggcgcactcggttgttcgccacgggattggtgccaaattcgagggcgaaacgtacaaaccgctgttctatatcgccgacgtcgaaggcaaaagcgagaagcatttcaacggcgaagggaacgtggtgttcaccaacgacactttcaacctggttgtcccgtacaacaaagccggccatgtgcgattggttggtattatcatgccggatgaaaacgacaatgacaactctgaatcgctagtgcatcagcaccagatcacgttcgacgacgttcgaccccagatcatgcaagccatggatatcgatatcaccaaggtcaactggttctccacctatcgcagtcaccaccgtgtggccgacaaattccgcagcaatcgggcattccttgttggggatgcggctcacatccacagcccagtcggcgggcagggcatgaataccggtatcatggacgcgatcaatttggcgtggaagctcgcaacggtcctaaagcagacaaacatgagcgaggatgcacaaaaccagcttttggattcatatgagaacgaacgccgctcattcgctatgatgatagtcaagtccaccgacgcgggctttaccacattgacgtcaaaaggaatcttcccacacattcttcgaaattggctgattccgtaccttgtgccactgctcttgaaacttgattttgcccggactagaatcttccgcggtgcttctcagctcgtttgccactataggggcagcagtctttctcagactggagaaggggccgtgcagcctggcgaccgtctcccatgggctgcaatcaacgaggtggataacttttcaactctgcgagaagtctgttggcagctccatatctatggcgaatccctaccacaaattgaaaagtgggcccaacagacgagtgtgaaggtcttcgtctttccctggcaggatcaatatgccaatgctgggctgatcgagaatgccgtttacttgctgcgacctgatcagtacattgcagggattttcaaggacccctctgttgaggggctgaacgagtactttgctactcgggggttgtacctaggtcgagactagactgtaaataccagctctctccactatccagttcatcagcttgtaccctgagaccacgtgcattgccctcgcatgttaccggtaatttcccgtttgagatgcggaatatcatgtacatttccaatctagtcgactcccgaagtgcaccaagtcacagcttgtgaacgggacatgggggccacatggtctgcacacccctacggcatgccagagaaccggagtgtgattggtgacttggcacatattaaagcccgttgacgcccgctgtgattggtgtacctgtggggctaaccatgttcccctactggggtgggtctgtgggagaccccacctatactttcgcagggcattctccccggcactcgttctatgtggcatccaatctgtatacgacaattgataattaccgacagcctccgagttgtttcaaactccacctatgttgtgtcgggcatagtcgcttacaccgttgatcggccgctgagaactccccgggtgaacatgtggcagcgacggcggcttctcatttgctcgagcgtctaattccaggtacagggctcgaatgccaagcgtctctcctgatgcattggcatgtagggagggagatataaaagccttgcgaccaccgagggaaatgatcttcgtactcacctcagtccatctctctctaccacacttcccggcacgatgaagaccaccgctctcatttccctgatcggcctgtccggcaccgctctcggtgccgctgtggacaagcataccagcacccccttcggctacaagcctggctccaaggagtccattgccaacatgaaggacaagattgagaacgttgtctggatccttctcgaaaaccgtggatttgacaacattctgggtggagtcaagaagcagggtctgaccaacgttgtcaacaacggtcctttctacaacctgcagaatgtcagcgacccccacagcaccaagtggcccagccagtacaagaactacgactcggtgatcaacgatcccgatcactcgctcactggtaccaacttcgagctcttcggccagtacaaccctgacaatgccgccattgccaacggtactttgacccccaacctgtctggctttgtcgagcgtcacatgctcgcccaccctaagatctctgcccagcgtgctgctgacgaggtcttgggatactactccgagagccagatccccaccattgttgacatggttgatgagttcaccaccttcaacaactggcactcttgtgtccctggtgtaagtaccttccgtggtgcacattaaacaaacatcaaactgaccatcaattagcctaccaaccctaaccgtctctgtgcggtctccggtttcaccgatggccacggaaagaacgacaatgatttcgatgtctccgccatcgagaccggcagcatcttccagactgcctctgagaagggcatctcgtggctcaactacgacggtaccaacggtgccttcctctccgatgccatgttcttcgactggaccgcgaagaacgccaagagcaacgtcgttcccctcgagaacttctaccaggacgcctacttgggcgtcctcccccagttgtcctacatcaacccctcctgctgtggcctgaacaccaactccatgcacccctccggcaacatctcctacggtgaggtgttcatcaagcagatctacgacgccgtccgcaccggtcctcagtgggacaagacccttctcctcgtcaccttcgatgagactggtggattcttcgatcacgttgcccctccccttgccgtccgccctgacaacaagacctacaccgagaaggcctacgatggcagctcttacactttcagcttcgaccgtctcggtggccgtatccctacctggttgctctctccttacactcccaagggccacgtcgagggatacggtaccgaccccgccaccggcaagactacctcttacagtgctacctccgtgctcaagaccctcggtctcctgtgggatcttgaggacagcagccctcgtgttcagcactctccctctttcgatcacctcattggacctcgcattcgctcttctccgaagacccttgcgaacccccacatcttccccactgatgtttaagaggtgctcctacagagtggcactggcttgatgagattaatcttccgcaagttggagcttatagacacgcgctgcagattttgcagccgattttctactagtctggttgtttctagttgtttgagtacagtcaaaatataatacaaaaaaaatgtttttaacttcttttcaacttctttcaagtgtctttccagatgttcttagttatatgtctcttgggataataagccgaaaattatagagcatggtgaaaagcacaactcggacaaggctgttagttcagagaaagttcagcaggaatcagctactatattttgatcagtatctcagcttttctatgccattcttggccaatttcttagtttggccgagtggagtggggggattatttaaccccgacacgattcggcagaataacttggctttgtatacatacttgatccttcattgatgtgagagtaaatgtcttgaactccccttgaagctctttcgcaatcaattctagagtacaagttattttatcatagaacacagcgaaaattcaagagagaaatatgcaaaatatacaaaagtccggatttgtgcctaaggcatcaaccctaaacccaattgagccgtcgatctggagattctcgaattccgctccgagttgacaatcaatgaccaatcttccctacgagttctcctcacccacagcttcacaacaatcaaaatgccttctcctataagattggccaatgggctcctaacccgagccacccgcaatatcaccctcgaatccgcctcaacacaacgcatcctccctctcctccgaagcaacaccgcaccacaatgcagagcctacacccaagcacagcgtccacgatgcgaccaaaacatgcgcgccatggtctccacacagaacaaattctcaacctccgccttccgagcaggccccaagacaatgggccagatgcgccagcgcaactcgaccggcccgttctcgtggaaggccgcactgctcttcgtcttgaccggcgccggcatgatgctgtacttccgtgttgagaaagcgcgtctggagcgcaagcgcatgacggagatgagcaagggcgttggcaagccgaaggttggcggtccgttcgtgttgaaggatcttgatgggaaggagtttacggcggaggacttgaagggcaaatacagctttgtgagttaatccggaggatggaatagagagcatcaatggattcaatggattcaatggatttgacatgttggaacggtactcgctaacacgatctcgctttatttcttcaggtctacttcggcttcactcactgccctgatatctgccccgacgagctggacaagatggccgagattatcgagaaggtcaaggctgctaccggggatgagaagatcttcatgcccgttttcatcacctgcgatcccgtccgtgatacgcctgaggtgctgcgcgagtatctgaaggagttccacactggcatcgttggcttgactggcacctacgatcagatcaagcacgtgtgcaagcagtaccgtgtgtactttagtactccccgggatgtgaagcccggcgaggattacctcgtggaccacagtatctacttttatctgatgggtgagtgctgataagaccttatacataaacgtatgctaacctttatcatagaccccgacaatgacttcgtcgagtgtatcggccgacaggatacccccgagtctgcatccaaggtgatcctggagcacatcaatgactggaagagagaggggaagccactcaagacggagtaagagtctcgcgtcaggtgtatgtatggaaattgtacaatagaatcattcgaatatctgaataccctactcacgccggaaccgtgtcccaatgttcccgtttttcgtgcttttgctcgtatactcgggtattgcggccaagatccgtcgaatatagaggcccagaaaccaattagttttaggttggatgccacctgtaaaagataaaatcagcattacccacaagccacactcgagaataccaccaaccagccaccaaaaacatccctaagcccccaaaaccctcccctcagcatccctctccgcattagccctccactccatccccccatcaacaaactcctccctcttccaaatctccgccttctccttacaagcctccaacacctcctcaccagccctccacgccgcaccccgatgtcccgcactaacagcaatagcaatcgaagcctccccaatcggcactgtcccaagcctgtgcgcaatactcacgccctccagcccatgcgtcttcaccgcggcctcggcgatccccgctagcgtcttcagcgccagaggcgggtacgctgtgtagctgagctgcgagacggagcggccttcgaaggtgtcgcgcgtcgtgccgaggaagaggatgttggcgccggcggcgggtgaagatgtttgggataggtaggtggttgcgtcgagggtgttgtaggttagtgttatgtggatgttttgtgttgtggagttgtgggtgcgtgggtaggtttttgggtcgaggtgagctgggaggggggttgggtcttgggatggcattttgggcgcgttgatttgggagttcggtataactgggttgaggaaatgttgtttcaattgtggttggaattggcgttggagttggagctgggctgttctgttccccctcgatgcttatctgctgcggggaccggataagaagtgtcccccgatttgcggagagcaagtcgtgggagttgacagcttgtctatgttggttctgtaatctggattctatgcttggatgtgttcacgtctcttcatttcaggaaacagtctaggtacaatttatagagtatgcggaaaatggcttgccttgtggccatcctcagctctcatatcaaacgagcaatacaacagcctcaaagggccgaagtgtccacttctcaccggagaatcgcttggaagcctcctcaacaccttcataagtattgagcaagacctccttcacgctggtgataccgttgctcgccgcatcccactctagagtcttgtctgtccagttgcacacaaccaaggctttttgatcgccatactggcgagtgtacgcaaagacctcctggcttggcttgtccagaagtgtgaaatcgccatacacaaagatatcaaggtacttcttgcgcagcttcagcacagtcgcccagtaatggtatgttgagttggggtccttgatttccgcctcggcattgacccgcacataatcggtgttgatagacatccagggcttgacgccaggtccggtgaagccggcattctcagcagcggaccactggaccggggtgcgtccgttgtcgcgagacttcttctgatattcttgcagggcaattgcttgggcagcaaggtcgtccttgggtattctgtagaatactgtcagctaacgtccacgagttgcactaggaaagtgtcattaccttttccagtggttcagacaatcaatgtctttgtattcttcaataccccattccttgggcacatttcgggttcctatttcctgtccctggtaaacaaacggagtaccagcctgcaatgccagcgcagtagccagcatcttcgacgcgaccagtcgatactcctcactcgcatgcgcgaagcggtcaatagagcgtggctggtcatgattctcccagtagagcgcattccagccatcattggcatacataaaggtctgccaccgctcaaagaagtccttcaagtcagtgagttgccagctgccaggttcaaacttatcaagcttgccatggtccaggtcaacatgttcgaaattgaagatcatattgatctcatggcggtcgaattgcaccgcacgcagcacttccttctcgtcggtgacgaacggcatctcacccacgctgaaggcatcgtactcctggagaatcttgcccagatcctggaggtactcgtgcaagcgcgggccgttggcataccacttgtcgccccactgccagggtgtccgcgggtccttgatgggtccgtcggggaatctctggtccttgctaatgaagttgatcacgtccatgcggaacccgtcgcagcccttgtcgagccagaaccgcatgatatcgtgcacggctttgcggacaggcgggtgttcccagttgagatcgggctgctcgactgcgtacaggtgcaggtagtattcttgggtctgctcgtcccattgccaggcgctgcctatagtcttcattagatggatgtaattaaccgacgatgataaagtacgtaccctggaaatgagagacccagttgttgggaggctggcggttgccttgttcgtcgtacttagccggcttccagatgtaccagttacggtactcgttatccttggagctgcgcgcctgcttgaaccattcatgctgatcgctggtgtggttgacgaccagatccatgaggagcttcagaccccgctcatggcatccggaaatcaatttttcaacatcttcaactgtaccgtactcatcggcaatgctgtagtagtcggagatatcatagcccatgtccacctgcggggatttatacgatggacatagccagacgatatccacggcgaggttcttgatgtagtccagcttggaaatgataccggggatatcaccgataccatcatcatttgaatccttgaaggatgcaggccagatctggtatacggagctctctttccaccaggcacggtggttggagtttcctggtgtagccatggcggtttgaatgcggatgacaattaagagatgagattaggatattccgagagggagaagagggatttgggattctggagcactgctggctatatatatgtgttatttgctgtaagagatgtgttgttaaggtcacttgaagcatgtcccaccgtggggcagatgcggacaattatcggggtcctcagcgtttgatatgttctatgtcggcccgagatcccctcaacgattgatacgtcgtatgtcggcccgagatctctcgacaggggtgagccgacggagtactctgcatgggttgaatcagaagccaaactgctgtggatcgtctccacctagatgacatgggactaacgatgatgcaactggactggatgggttcttggcggaccatctgattcatataaattgataatgagaagtagaagtatagttacttgttaagacatcaagtaaactactgtttccgaattgaaaattgcactgcatacttccatcatacgatctacaatctctacatagatctcaacatcattgcatggtacaaattcccacctagcgggctttacgttgaattccaagcattgaattgagcaagtctgccttatagggactaatccgggaggtttctggaatcctgtgaatgttacatgttcgccttgagtcggttgatagaaaattgggggttattttcgtcaattcagctagatctccaagccgttctcaaaacatccggagaacgaatgcatatagaatgcagggcaagccttcagaaacgccgctatacctcagacgagtagaaacgagtcaagacgaggtagaaatataaagagacgagatagaaacggcgaatctcaaggcggtgtgacggtaaatatagcggaatcgaggtaaatcgagagcggtggattggccatgttatcgttatcgtagcttcgattattccatctccggcttttgtaggcgatcctttcgctcagttctccttttaaatgctcatcaaccatggcgcctccgtaccggaatgacaggttttcttctggctcatctaaccgaccgttcccttcgcgaaatgatcgcgatggccgcatgtatgatgatcgatcccggtctcgctcgcctggtaagcttctccccgcacgtcaatggtgttaagcccatagacgccttcggcacgggcccaatttctccacatggtattgaatcgtggctaactttattgtcatttgaatcgatgaataaaggtggtgcacgctcccctcctcgaagactagcggccgacagcagactcgagtaccccagagaccgagaatctggacaaggctaccgaggccatgatcgagatgataatcgccgtcgaacctcgcgctcttctcctcataggggcagaaacgcgtacaaagaccgcgatcgagagggttatcgaagcgcgagcggcaatcgaagccgaagtcgcagccctcgtcgaggtcagccgaatatgggacaggtgagccgagaagtgatgatggatggacttccggtggacatgaccgaagaagatgtgagtcattaaatcaatgccctgatcaggcgttaaatatctccatcgccgaggacaaatactgacaatgcgctctatcatgtgcaattagatcgcgactgaactcagcaatgcctatcatactgacggcctggaagatattcgagttattcgtgaccgacaaacgagtatgtgaaagaaacagaccatttgcaaacatgcgcatcgttttaacctgatattgtgtccaacagagttgtcgcggcaactagggttcctgcgattttccacgattgacgcatcacgcgaatttgtcgaacgcaatcatccttccatctttttctacggtcccacaaacgaccgtagtactcaagttcgcatagcttacagccgtgagagagaagaccgagctcgcgcaaaaggtgcgagtgactggaactgcagaaaggtaagttaacgtggtggggacaggaaacatgctttcctaccccagacgtacgcaattactgttactgttctgtgcttaccaaaccagtgtctcgttctcaacttttccacacgtccacactgtttcaagtgcggtaacccacgacccggtacgtataccatcctccacccctcaattctcatcaacactaatcatcctcgcagatatggataacggtcccccaggagttccgattcctaagatagctaatgatggtgacaatgatgtcgctcctgagagccagccttcccaattcttgctgatccgtggtctggaggcgtctgtcacagaggagcttcttgccaaaggagtttctaaactctatcggccggctgtcaacaatgacagcgccactgacaatcaaaagaagggatcgaagatagcatcgaccactggtgacagcaacttgggagctcgcgaaggctctctccgccgcgtgctccttgtacgtgatcgcagaaccaatgaaagctggcgttacggattcgcagaattcgcgggaatcaatgtacggttatcattcatctctcatattgtttcctcttctaacgcttgacatttcaggatgcacaagctgccatgacgagactcaagtctttcgaaaagtttaccatctcctcaaagccggtgttggtcacctacattcacggtggagtttttgttccagtcatgaacgcctcatccagtgctagtcacttcacattcagcccatctaacaacccatcgctgaagttgatgtactgggatgatgcagcatacgtgaaggaactcgtgctgtcaacagaggaagacgatcctgtagccaacaagacaacttccaaccatggagacgtccaagccaagggcacgaaggacgataaaggcaaaaagagaaaagccgatggcccgcctatttcgaaccccaagaagcttgcaatgccatcccagctccaattctggagtgaccgccacgctgagctacatgggattaacagaaatgatgccggaaaccccgcagagggctcgacctccgcaactctggcgactgactcggccgctccaccagctccatcattcgcagactacaaccagaaccgctgcctcctgtgcatgcagcagcttgtggatgcgggtcatctcagataccacgagcgcactagtgatatccacagcgaaaacctaaaggatgtcaaattgagggaactcggcgtatgctggttgatgatctatggtatcgtgccgttgcctactccgaactatcaagacagcaaagacgaatatcgtgacggacttgaacaagaatactccatccctccatccgctcgatcctttgcagacctgaatcggaactggtgcctgttgtgcttcagcaagtttgatactccggcagaggtcctcgtgcatgaccgcgtcagtgaataccaccgaaaggaattgaaagatgaagaggcggtgaagtggggcttgaacaagcttaaagaggcggatatcgcgcaggatatcgcgccggcggctccagaatatagagaccgcgcaaaggagcgtcggaaggcgttcggacgtaacgatgccaatgcccgcccgagaccctctgaaccagaggaagaggacgagacacccgttcagacatcctcgatcggcgcctctcttctcagcaagatgggttggtcggaaggatctggccttggtgctcaaggaactggtgtgactgcgccaattgctacagaaatctatgcccagggcgtcggactgggtgcgcaaggaggtcgactgggcgatgcaaccgaggaagctggtcggaacactcggggacggtacgatgaattcctggagaagaccaagaacgccgcacgccagcgctacgaggagatggaccgatcttgatcaattcaagacggttgaatgtacaatagggtggaagtggtgggggtggttgggatatgaattgaaagtgagggggagatatctgatgttcaccttgtgccataactgggcagccgattccatgtatgattacgacaactaatgaacttgtacgatgttcctaggtagttgatttcctctgccacttcttggctatccctttccgctttagtgctcaggctttgccgctttttgctccctgaattccaaaaagcgctcatgagtcgtagtaaaagggaataacttggccaagtcggttaataggccttggcatctcggtcttttccgttcctctctccttccacttaaccgcgcaaccacacatctcacctgcaaaaatggatgagctccgtaatagacttgacagtcactggactggtgcccatgtggctaatttgaaatccaggaccatgttgcctggtagggggaatagggacacgttgacagtttgcgagctgttgagcgaaccgtgggcttttgactctgtggcgttttaatgaggataatatcctcgtgtgcccctatttctacctttcaactgacaaacttttccaacttctagtcattctttttttggatattgttgttttaaatcactttctttgcatcatcagtcactccttaaaactgttcgattgagcaaaagaatacgacaatcaaagatgatgcgcttcgtgatttctctggtcgtctcgctcgcttcgcttgtcgctgccattgaaatcaccagtcccgctgcgaacacgacctacgcagccgggtccaccgtcaacgtcgagtggactagcgttgataccgatcctaccaacttcagtctttatctctggaactttgtctcctggcctccatcttatgttccgctggccatcgacgtccccacgtcggatctgtcttactctgtccaaatcccctgcgagaccacccccgactggggttaccaaatcagtggtatcaacggcacgaacgtctacatcatctacgcgcagggtgagaagttcaccgtcgacaatgccgacaacagcaccgcctgcgtggacactcctttgccgactacatccatctgccccaacgctgcggcatctaccgtctatgtcacggtgagctctactcccagctcccgtcctttccatcatccatcccacgcccatcatctatcccacgtccatccttctccatcacccagcactgccagcatcttgacctctggatatacaaagcctggaattgtgcctaagactataggttggtgctcagactattcccaccctgtaaccttggacaaggttcccgccccgactccgactctttcggctcccaacgatacaaatggatctgatgcttcgccggtcttcactgcggcactggaccaggtcactgattcccctggcatcctcacattgactatcactaacactgcgaccgtgctggcttgcccgaacgtgcacacaatttgatggaagtttatccgagcaaccggtgaccagtccacttctttatgtcgatgtatgttatgtagtaccgaacgagaaggaatttatacatagtagatcgaaatcaatttcccccttgtactttttaattgtttctcaaattctgactacattgagctgctcactgagcttgagcccggtctgagctttactcgctgagtcggactctgagcgccctcataaaagcggcggcagccaatataggaaagccctacccggcaggggaaacactacgtagagttacctaggtagtcatgctggcacccattcgggtgtctttccctttccattgtaatcggcaagccatgccgagtaaataaataatgtacagctggtatcaaatcatgagtagagtgtagtgagtgtagttggtatgtgcaagtaatttttgcagagtccttcctcagttctctttcgtatcctggttctcacggaacgccctcttcatcttctccttctccaactgcttctcaaacttatcaccgaggatcttagcaacccactcagtaacgtccttctcaagctcctcatcactcttcacaggcgtatcactaccaccctgcaacccgttccgcacgaatctccgcatatcctctagcccattaatattcaaagcatacccgaccgcaccgcccgccatcaacccaaacgagatcacattgagcgtagccaaattcagagcctcgaatgcgtcgcccgcggagttcgcgtgcggctggtggtacaccgagcttgtgtggaaaggcgggatgcacgcgatgcgtttcttattgaaggagcggcgtgtgattaataccgacagcgcgaagaacgtcattcctccgaagaaaagtttgaggtttgtgtttgtttgcggtgagggtggttgcgctacttgtgtttgggctggtggtgatgggttggcgggttgatcgggtgtcgccttgtcttgaggtgttggttggggagtctcgggttttgggcttgagccccagccaaatagtgataccatttttatgcgcggggtgtgtgagggcgagggttgtttggttggtgatgcgaatgcgaggcggagctgaataagctggaaaaggatgaaagtcgaaggatcgggagttgtagaattcaacagagaggatgactgggtatgatatttttccgcgaagataactcgaagcactgtatctgtgtggggttgtcttgctgttctcgtgaatgaagcaaatccgcgcggaggatatggcggatgtgcacgtgacccggttctcatcgaaggttccaaagttgactgccttcacgttacgacaattttgtggaaatttgactcatacttcggtgaaatgatgccgttgctttcagatagacagcacgcacaggaatatcccgttccggaactatacgaagcaatgaatggctacatcttagatgaggccgaatgagaatggaagtttttagggctagagcgtcggctggctcgggttctgtcgtccttgtgcaagtaagtcagatggaaactgtcgaccaggctgtcattaaacaaattatcttctctatgtatcatcaaagcataacgccaatcaaatcggaagtatgtaaggtatgcaaaaacaccgtggatgcaactgtcagaataacaatagcagaaaccgaaatccattcaaaccatttcaaaaagcattctcatatgttcataattcagcgcgcttcgtcaatatactgtgctcatagaaaaaaagtaaatcatagtaacatcataatagatgcaatccaaatcgtcaggaaattaattcatatcgccggtggtgataagcatatcagcgcgaccaggccgatggaaccgatcaataccaagatgctccttgccgtcacgaccgacataaatgccaaagccgtacaaaggcaggtggcgctccgagggtggagcaacaataagacgagtaacgaggtcagtcttgctcctgggctcgcgcaagattttatcagacagaagaggcgactgataaagatagctcatcagatcagccaaggttgtgatatcgtgtgggagatagcgacgacggcccggccagattgctatgaaagatacggcatataggccacagaaggcaatcaaagcgtagaatgctggcaaataggcagcgatgcggatctggtcgtggtcggagaaccagagggcgatgaagacgcctccggcgagaatggggatggcgagagatagcaggctcatgagggagatccaggcaactttgaagtggcggttgattatggcctggatggtgacctggaatgggtaggaggatgggtaggagagtaggatgctccgttcggcagatgcgccgctgggggatgagagttcggcgtatggttggagagctcggaagtatacgtcgacaggttgccaggccaggaagaagacgtttccgattagtgcggggataaagctgtataggaagttggaggaggagaatgcacttgtcgatgggagtgttggtagcttgggagggaagccgccttcgatggcgctgttgataaagctaacggcgacaaaagcgacgaagagggcgaagacaatgagagtccaaataaatactgggacgttgcgcagaaaccaaggtgtccagcgataacgggtggatggcgagtataggtggtgatcttgtgggtcattggcgaatgcaccgttgtgctcaagatcaaagcgaaccttggtaactccgtgtggttgatcttctcggcttttgcctgtctgatggagagatggggtgcgcactggggcatctacttcgccgattccgtagaagatctcggccttgctcgagagtttccagtatcccagtcgaagtactcgggggtcgagggattctcgcaccgaaggaactgtttcagagtgctcaaaatcgtggaggatattcgatcgctgtatgatcgagaccaaatctgcgaggctgacgggatcccacatcaagccagacgagccacgaaggaaacggatgaaaagcatgatcaggcctagtgtcaaaacaccatataatcccaccaatgtccagcccacggattgaaccgaagcccatcgccagacaccttgtccgtcaatgatatagtactttgcctggaagagacagctgagcagagggatggcgaagaaattcgaaagccaaattgtgaacaaagagaatccgaacaaggcttcaccatggcggaaatgggagaagtcggggaaaatgaagttctgcgagagaataggcaggcggttcatcaccagaccttgccctcgctctgctgacatcatagaaaatggtgcgatgcgatataccgcagcttgaatgacgaataaccatatgatgatgattgcggcagctatctgtggcaggaactgtagcacaaaatatctcgagtcgccttgacgcacgtagttccacaatccctcttcaccacgggaccaaacattgcaaaacactatacccgctatcatgagcagacagcaaaatatcgtgagcgccaaagcccacggccgcagaacaagaggcagatagtccaagggaggatacaacatgctcttctccggcgcatcaacagccatgaaggactcggggtccactgacattggcgtttgcggcaaagcctgtggtgagggagatgtataggacggtctcactggtggcgtgtcatgtcgaatgggggtccgcgtgcgggtgaaataaccgagtccctcgtcccatataagtctatcggttggatagtcacctgtcgtcgtggtggaaatagagtcattcctttggagcccccgagttctgtcttgggtgatctggtcgattgcaaaccggacgtatggggagtcatctgtgcctggagtcggagatggtcccgggtaatcactgggggatcggcgagaagtcccgtttgatcttgatccatcggatgtgggactgatgtgggccgctctgtcgtctacgaaccgaactgtgctggatgttggtgggcgttgggactcgcgatcttcttgggcaagctgtatttgcgacatggcgggtgatggtgcgtgggagtctggagtcctgaatcgcatggctgttgctagactctccggactagaggttcgttctgagaatgaatagtagtcgtctgatgcagccacggactgttgagattctgatcgggcaagttgcggtttgcttgctatataaggatcagttgacttgacttctggaagttgtgtaatgtctgtagttaaaaagacaacggggcaggggttcttatatgcacgtactgttaacgctgcgcaggctgaagtttctcgcctggttcatcatgctggctggatattgatcccacgcgcaacggtaattaatctagaagcattcctcgactcccttgagatacgaagggatttttcgagggccagcaatcgctgcccagcgggattttgtctgccatagtgctgggtgacgtctcccagccaccccagccacacacgctgagatttgcactcaacaaaccaataaggatgaattaaattgaagagttgaaactcaggcactattcatttgatgaatcatactagaaattccatcgaattaaaagttgaggaagagttacggaggtggttgagttgtttcgcggcccgatcaccagcacatccatcgcctaaagcttggccttttatctctccaggtctcaccaagtctcacacccgatcacctttcttttcaattttccaatttcaagaggtcaatttccacggtaaccatatcaaagccctatagttcttcttgaaggacgccccagaactacaatgtaaccatccggactctgcctcgcatctacaattgccacactggagccccaaggcaataattgccaacaattgctgctctagatagcagctatacgcaataaaaaagcagggtgtgttcaaaaatttgtcaatggttgcagcccactaacgcagcgtggtgttgcaattgttgttctcccttgcaggtataagtggctggaactagggcttcacggtccgccgagcacatgaaaacataaggctgtatctagggcagtatgaaacatgatcgagggcaattgtgtctattagacaatgtttaggatacgcatatctgtcttattcaaatgaagatttctgggttctcgttcggttatggataaacacgctcagaaaatcctgacatatgaatagttggtccaagggacttagaaatcgagaaacagagagatgaacatgactaatttttccgtttgttattaggtgctggatttgaaatcgtctgcctcttactctgtacaacaaatagttatatgtgcttccccggttctgtttgaagcttgccatataccaattaggtgtactccgtaggcacgttcaattccgattggtggcctcgtcattttatttggtacgttgtaaattcgcaccatgtcctgggactcttcaagagatgatactaccatcctctatttgattctattgatgctataagcaggccgaggttattgattccctacgctctgtgactccatttgatggcaatctaccattcttgatctcgaggccaattcttaacacattcaatgtgaaattattcttatttctcggccattatggcaaaggactctgttcatacatgtcatgtcagtaagaggtaaatctggcaaacttgagagtcgattagcacggaggaaagggaagcaggacttgcgcagattgccagcacctccaatcccgattctaacatagcgctcttgaaaaccagacgtcgaccgagtatcctgagccccattgagcctagaactctgcgctgactgtgactggagaagagctactccgtctaaggtttctaagggcagttgcccttcgtcgtcctcggatttctgccgttttggccaactgagaaacctccataggcagcgcatggttttcaaccggaggaatgagtaaacaaccttggtcgagggtttatcaaatcagtactctggctcttaatgtcttgatagattttacttacgattgcttcaaggcttcgaccaacttcaaatgatctttgcataaccctgtctcgtccgggaataatagctagttatacgcctagctagccggtccctttccgtgatgcaacgggttacgcagaacgaacactgtacgaccatgaacttcaaatttcccggaacagccagactggctaccgtttattgatataggatgatataagaggaaactatgacatatcagtatatgataatttagccaccaccaggagataagtcagtcatacatttgagatggagtaacgcattcactatgtgtgacaatatatgcctgcagtttttgcacgattcactaaagcctctaaagcctctagagaccaatttgaacaaaggctttgtcaaaatggagaaaatctggaggacttttattctatctacctcaaaaaagatcaccgttgatatacttctatttcattctaaagcagtatcttggggatcaaatgatctagtggtgtgtccaggttgcaatggtcacacgactgtgacgcgatagtgaaaccccattaggaactattggtccatgtggtcacaagcttaaggttaatgacctgaagatatcaactgcattcggagagagcctatgtagtaccttgcattagcaaaagaacggaagctgatcatgatcaaagatgatcaaccttatctggtctccaacaaatagaatgacgtttggatatccagttagggatttgaggtggacctgtttcatattttttaaaaaaggtgggactgtgggcctccgacggtgatactgagagtccggagttcaggcccaagcgtttccggggctaaatatcccggctgatagcaaaaactgctgtgccgcgttagtgggtcagacggtggcgagattgcgagcaatgtttgaagggtgtgcctatggatcgcaatatatggcgtatcgtatggacacattttagaaacacagatcttgtttcatatgaataagatgaggcttctgaaaccatgtacatattggctctttgaagaccctaattcgaaaggagaaatgagcttcagtcacttggtaagaaaagcaggacccaatcgaacacggcagagaaaaagtcgtgtttcctaaggatttaagaagttggcaaaatagccagcgggaatagccaatgatcttgcaccagccccgattgctccgacggccttggcaaccccgaagtggcacttcaaccgcgaagggcgaatgagaaggcagaacagctctgcgccaacgtccccggcattccagaggggaaccgtgcagcggggcaaattatttagcctcgcgtttagatgttcaaaggattggaggaggaggtcaagagagaatagaaagcttgatatgaggaatgacagagtaatgtacagagtagataggagggagtacgtatgttgtagaaataaagtggcatcatctgactgctgcctgaggccagaaatccaaacctcctcctctctccgcagattctctggtttatctgcgctcctcgtcattcctttattctttttgagtccgtcgattcttttgcttctttgaatttccgtcgactcttaaattcttggctttcccctcatttgcttcttctttaccccttctttgctcagaaagcttttatttcgatcccgggttcagatgtccccagccaatgtggtgttagaacctcagctcttgcgtcgcgtgtgccattaggccatttaaaaaataatcacttgttttgtccctatcggatttctcctctggcctggaaaagagaaggtcggcttcttagggtctcccctcatcatgttgctcaaacccgcgacacccctcaccatcttgctgctgatcgcctttgcgcttttgctactctcatgtatctcaactcctattgtgaagggaattcctctagcaactttcaaagatgtcgattatggtgtctttggatattgcaagggtagtacctgtaccaatatccatgtgggatacacgagcagtaagtctcccccctgcgtgtctgcctattctccgctaagtttcatgcagatgatataagtagcacaggcgatgatttcaatctcccttccggtactcgaaagtcactgtcctcgattctcattatccatccagtcgccgccttcctgacccttatttgcctctgcctggccattgcggcccacttccatgcgccctcccactcgccgcgcttcctattggcgcttctcatcttgttgctgccaacactgctcgtgtctctcctcgcattcctcgtcgatatcttgctctttgtaccacatctaggatggggtggttggattgtgctggtcgcgaccatcatcctcacctcctgtggagtggtcacctgtgccatgcgccgaacccttgtgagtcggaaggcaaggaagcgtcggatcgcggaaaattctgagatgagtggagagaactattataaccgacagaatgccgctgcggctgcgccccctgttccggctcccattgaccccaaggaagcctttgtgtcgcactctctcaactccgactcgggcccaacattcgcatccttccacgtggaaacgcgcgacagtgatgacgatcgaacacccctcaactcgcggactcccatgagcgataccccagcacaaccggaccatcacggtgctccctatcgcggcccgcaagatgaatttggcaatatcccgcctcagggcccgggcccgtacggtgcaggtctaatgtcacggaatccctccgatccccgggttcgcccccaatattccgatggcagtatgggttctcgaagaggaggcgcgccgcctggcttcaatggacgcgggcggggtggatatcctccccggggtggacgcggtggacgcggtggacgtggaggaccttacatgggacctcctcgcggccctcctggctcccggggtggctacatggggccaaatccaggccgtggaggtcgcggtggaattatgccaccccggggaccaccagtcggctatgagtccggtccaggcggccccaaccgcggtttcgacgcatacggtcgacctgggtcgcctcccatggatgacccttatagttatgggccaccgggtcagatgcaccagccacctcccgggcccattggcatggccgtgtcaccggagacggtaggccaagccattgagatgactccgcaatctcgcccgcagtacgagatgcatgagtcgactcaaccaatgagcagcgtaccgcaaacactgtcagccgaaaaccacggtgccgtccctgaaagcccgacaagcatatacagtcgaccgaagtaagtcggaatgctacgaataccgttcctaagttgaccactaacctttgttcagttcctatgatcctcctcgctcgggctggggtgcaaatgatcctcgcactgtgaccccgcagccaccgcaacaaaacaacatcagtaccaattactacgaggacgtggatccccgttttgctcgtcggccatcgcctcctactaactctgggatccccccctctctgacgcctggagctactcactgtacgtacactcacagatcacacgtgttgaaggattcttgctaactttctcctagtttgatgaaatctattggtttctaagtgttattcatgtttgacacgattctttccacatcttctatgctttgcgataccctttgcttttcttcttttctctggctaaattttgattacttttttccctccgatttcatgacacactaagtcattttggggaatggagttatggtgtccttttatcttcccattcctctataaatgctctcttttgggacgacaagacgtttcatcttgtccccaaaaatccgccacaagacacggcgttgagaatggtaattcttttcgctgctcgattgtactctgcctggacttccatgtatagcagcaggcggatacgatgtacagaaacaaattcctaagatgtctggctttatccaagatcaacagcatatgacgctgctactgatttgatcttttttgtactttcttccactgagtggactgtgacttttatcttacccgaatccatgtacatttctgttctctggtacatttgacttttcacaatttccaaacataataattagctcttctgtgatctccgcatatgattgaaatcttctctccccaaaagaaagatagccctgtaatataacatagatcgagatcttcaatcctccttgccaatcatgaatgggagtactaattcagtctgaatcgacatgagaacaagcccaatgtctctggtggcgaagatgacgacgaggtatagatgattcgtgagtggagctggcttgatgagatgagcatgttgcttcgagagaagcgtgaagttgaatgtgtacttagggtatttctagagggtctagattgtgagttgaggaaggctcaacgggattattgtctgtccgagaaggagcaggggtctaggaaaatgatagcaaggaagggacgatgaatgatatccttgttctttccaagtcatagctcaggtctggggttattcctcttttgttttgtagagttgacaggaaacagggggaacggactgcttcatcgcgatagactaggtaatcgcaaacatatcacgctcatattacatttttcatggttttagaggctctaactggcaaaatactatgtaataattctcactttgctcttactttttgatgaatctatcgaatataactttcatatcaattgtggcttactctgatacggtcttacattgtcactatatttgaagtcatagaagtgtacaaacaatataagcttatgggtattgataccaggaaaacaatggttaggctgtactaacattattctattcattttatagagtccctgaattactatttaatatactacccagcacgttgaactttcaactccttcaacaaccacgatcacattggatacctactacaacccaagaacacaacttacaaggtatgaccccttaacccatggccaagatttggtatgaaacaatgagctatttaggtctctgattacattgcaggttgagcatcatcaaccattctccaaatcacagacatagcctatccaatatcccccaaccagtgagatagacgctgtttctcatccttcaaaaacagaggctaacaagcttaaagtgaccgatattcggcccattccgtcgcccaacaatgcatagctagaacatctagcaaggctcacaagccgtgcaaatcttcgcgctcgtgagtgccgaaagatagaccaggagatatcgcggattacgagcagcaaggaagctacaatgaccgcaaatccatacttccactatactcatggaaatgtcctagcggacatggacagagaattggcgtctctctgcagcgaacttagggatatgaagaaagaagaaaaaaaagaggccatgatggaacaggaagtctggaaccagattggttgaatgagaaccaaggcgttaagagtttggctcctataatggacaatgcccttcccggctctatcctcgatattatcacgtttaccaacagtactacgcattcgtttattcattttaatattccattagtagagctgtaaggtcaatcttctatgctggaccgaagcgcatatatcgtttctagtcagtacaatgacagtacactcaatagcgctactatttccctttggggtggcattctcacagatatgggcatttctggtatagatttacctatcatgagaagtttcagctccagtcaaattatcgtatgcctatagctcgcgtttgatactgagaactgaaaagctctaacaaatgctagagctatgtgacggctggtaactacatcacacggcagtctagattgaagtaccgaaatccactatctaggcttagaccatgaacttatattgagatggtgcaatatcagtgtctgatatgtagaatacaggaaaaatccggtaccatgtcatttctgcgccacatcaacaagtccaccagaacaacttgatgagaaaaatcaccacaaggtacctgtgtactcccattcgacaaccgctcaggaaccttggaaatttattttggttactagtctccattaggaaataaagagtataaggataagagatttgttgatgtttagattactgagtatgggaataatgagattggttgtttcataatgtatgcattgcttgactatccacaatatatcggaggtttatctgttcattgcctatcaaaatgacgatctccttggccactatgagcacctttttaacttcctccaggatgttctttgaaacaacaaggaccgccagtacatgcctccatctctgttgaagtcaatgcatcggggtggcggaaagtggcaatatcatgggtgtagataagtagtaaatcgatcgtccaacgaatgctggcttcattaagtagacttttggagcgggcggcatcgactttcgttaggacatctcacaggatggagctcccagcgaaagtgcgtttgataccacgaagtcgacactgctctgaaccagtcagactatttccagactggagtttaccagcaacatctggtgagatggtatgagatatcgacaatgtatgcaaatttttcagggtcgctgcgaggatactcggggaggcacaatatacgaagaacatatcgtacagtttcaagcactgagctaccataggtagtaacttggaaccctgttcataatcagaaatcagcttagctcggggacatcgataataactggtgggtcggctgtatcaaccagccagtgcgactgagagcattctcaatttctgctcatttgttgaatttgacctattcgaaacagatccattgtgtaacggcccgatcaccttgatggaatgacaggcagagaatctgctggagaacctacattcattcttccaatccccactgcaagacactgatactgaaaggcgaggcctattggaaccccgacttgtgcgtgcgattcgaggtgtctcttcgagcatagacttgtacttgctctagctcctccagatggactggatgttcctcacttctttttcctcagcattttgtttcaatgcagttataaatgcagcacagttgtaacttactgaccaatctatagtaaatattcggactcttagtggttttatataatgaaggaaaacgggaaatgaccaaagagtaagagagcagggaagaaggattgatttctaaaagaaaaaaaaagaaacggctaactaaatagccagtggaagcctcacaaaccaggtatcaaggcatcctcaaaaaggaaaatccctagttaggtactccgtacagttcggattttcacacccaccaccacaggcttagtaaatcagttgtctctagttataactgcttcgcttcgctcctcaatgatagatatagtttgaaactgccatagcaaagccaaagttgcgagtacattctcggtcgaagcatatccagaacccagattgtcaaccccctcttcttccttctttcttcaacctctcgcacttccaataatacgcctcccaccaaaggtcagatccctcagccccatggctaagactttcggcgaaacaataaactaacagagactaatcttttgataggctaactaccttactacctccccagccagagaggtacaccccgcgatgcaccgttcttaagcgcggttaaaacataaagctaagaaggagacagtcactgatgagaggccaatcctatcaccgagcgacgagcagctataccagcttgaaatagctaaggcttcgggataacgagctcatcttcaaggaatgttgctacgggaggcgatataccaaacgggctttctcgagaatttccacatacaaccgaattgtacgacgagacccaagctgaagtgaccaccaaccatgccgtgctcaataagggagtgcgtgtgccaggcaagaaatggtacgatctgaaagatctcgggaaggaccgacggaccgtccttgcctgtattccgtccactgcgattggttccagtcctgcttcaaacccacaatccgattcccgaactgaactcgacccgaccaatcacaatggtcggccgcgacgaagcccgatagtctttcccgagagatgctccaaatcagcctcgctgatctcgaaggggaaatagtactgatgatcttactagatatactcttgggaatgtttgctatcgggactctgactctctacctacatcatggggagatacaaatttcactttacttttaccttttattaagatcatgttttaacgagcccatcaagaatcatttcgctatcaattatttacactgtatatattcaatcaatatacctagcttccaagagatcaaaatgatgagaacggggttgtggctacaagcattgactaggctttcgttcctggggcagtattcgcgcccactccttcgcgtgtttgttggaagatcccacacaagattcttctcttcttctctcaacaaccttggactgctctacatatactactgtcaccacattgcaacgactcaaggtatgaatagttggtacataaggaccatttgtggtgaaagaataatctaacattagtaatgttatggatcaaactttatcatacctttcaaggccgcaacagtcctctatcccaccctgctaaaagtgagatccacgccctcatctcgatgttgtattcctaactgtcttcagagagctgacaaagaaaagtggccgatagtcggccgattccgggcccgaacaacgggcagctggagatgctaacccagctgcgccttattcggaccacgctagctcactctcaaagaacgaaaatgcggcaggcaaggatggtaattcgccgagtacaacttctgacaagccaatgtgccgctaacggccaggcctctactcctcacgcattgtggaggctcgagcgaaggatacagtctctatttcgcaatatcctcaggttacaggctgaacaagaggctgcccgtgagtttgaagtggagatctggaggaacgtgcgataagtcaccaagtcaacgatctacagccctatagagccttgtgtggatcacaatatcaacattgaatatcggagcaatgcctctttatctttcattggttgtttacctttgaaacggatgtagaatacgagagaattcttgcattaaaaccggagagtaagctgaacgcgccttaatatgggctatctacatactccgtctttacaaagtaagtgctattgttaggtatctcagggcatttttaatgatataattgcagttcgaaaagtccgatgactctgactttgtgctccggatgaaagactgatcatgtatacattgattacgagtaccaaccaaaaccaatggatatactcctccaatatcagagcacgatttcacgaaacgattctacgcttgtcacaaatcacggcaaccctttcacctgcatcatcgatgtaaaatgccggaaacatattcttctgacactttaaagttcctcccaaagaaaaaaacccagattgaggaagtaggtgacaagcgagaaaattcctgggagatctatacgcgcgaaatcatcagcctacggtggatcatcttttacaaatttgattatattttacctctgttcgcattcttcttggcatagattgtaccctgagggcttgacatagacttacagaacccatctatcccgctctctataatgatttcgatgctttcactgtttggggcgtttttcttggcagcctgcagtttagaaggccgcattaaatctgtgattgatagggaaagatcagctgtctattggaatttaaaagataatgtgcgatatgctttcaaaggaaatgggtctgagcgaatctgtaatatttatatgcggtctactgtacgcgattgctatgctgtctctatccggagggcgcttcctcagctcaatatcagacgaattgtcgaatgtttacggatagatcattggtatggtagaaatatataattgcatatacattggtatacttggcatatctatgaactattattggacgagagcgctgtaataagaatataggatgaaattgcattaattatatagtggcctgtttgtcttatttgccttagattcggcccgaacgggggcctgaaagcccgcgcgggccgagaagtcaggcccgaagctcgacccatcgacgggccgggccgggtcggtcaaaacgggctttggagaagtctacctcaattcttctgagaccagtcctcaacaaaacgcctgtggcttgggttggcccctctgtcttgcattcaatgcaacgtgggacagggataatgccatagcagcatcttccctagacccaattttattgacccttatcgcgccaattatatttctctaagctgggtttgcctgacaaagctcttcttcctccattcgtaaaaagcaactggcttttaccctggctttcaacacaaggaaagaatataaatactataacccgagtcttccaatattcactcatcatgacaataatctatctccggttctcgaagaaccctgctcctgttgaagatattgccctcgtcaccaagactcttctaaacatcaacccaggcctagacgagaccgagcgcaccgaggataccatcaccttctcttctacagaccacgacgtcgacatctttggcgaaatcttcgaagaatggctgcattcagaacccccagtcatcacaacgtttcgaatgctggccgattcttaacggctgccgtcagcctcctgacattattcggatccgtgtcagcgtcggccctacctccccttctcgagcttacgacggactccgtggatctacagtctacatatactttcaactgttactctcctggcaaggcatgcagggggaatggggacactactggtggtgggtcttctacggagggctgcacgcccatcagtgcgaatggctgtagctagtattccttcaacggaggtgggcagttcaaactctgtgtctatgaaaacagaggatgtaccggtaacaccgttacaagtgtcaatggtggctcagtgacttgtcttggaattgaaaatgcgggtgcttataaggtgatcagaagagataccaactgctagaaaattcaggacatcaggctagccgagttccacggcaaggtgccttgcaaaaaacccatactacccgggatgagctccgtaaagcaaggatccaatgcggttacttctcgtggaatgaggagctttataggcagttttcgggtcttctacctctttgagctccaggctgtgcgttccatggctgtcagtttgatggtaaagcaatatcgtacccgacggaccacagctgtcttcgagggggttccaatgaatgatgcatggtcgtgtttggggatcatctgcagcctgagtgattgtgaaggggattttgtaaattgggtcgtccacccccacgtcagcagttgaatctccttcaattttgagcgtgaggtggagtgtgtctagtctgttctaattagtctcttttttttagtttcaagggggatcttcttacgttctgtctttcttggaatatttcacgaagggtagcaactgctgatcattgagttcttccatgtggataatttgccagacttgcgattctccgtgtcggagagttgaaagttggacacatcacatgatcatggtagggatctcggcatcagctaccatagccctgttgatgtttagattactgagtgtgggaataaaatgatcttagttgtgtattgctcaagactgtctatctgtctgttcgttccgcatgtggatcctcggccagatgcccagttccactcagtcataccccagattacttggtcatttcaacaagctccgctactatccatagagaatatatcatctatcttactgcgccttcatgaggaaggtatagatgtcactttcgaagggaaagagcgaaaccagactgatggcctcggcatttctatggtgatcttggtaatgataaatgaagccaagtaagctgcttctagtaatataatggtataacagaagggtagatctctcaatagaaaggaaaaggaaattgagcatgagaataagcagttgaaggctatataataggtcaatagaatccgtttgcctcaatgctgcctttagagacctctaactacggtgagcatatccgttcttcctaggcctttcaaacagcacatcttcattaccttaaaaccaccttgtctgatggataatagaattatatacaactcatcattctttcattcataaataagttgcgcagtaaggtgaatagcagtcatagaactcttagcgctgtacaaacgagttcttctatagatcatttgattcatactgacatccatagacctgatcaagtgaagaataaggtgtttacctataccgcccccaatgaaacaccatactctctcacttctgatcaaacacacaacacttgccacactcaccatcacacaatcaattgaactttctaccatctcaacgcgattcttgtatgcagagatctcacatgagcttcttcctttctacaaagctcacacactcccaggataccactcaacagataccatccaacatcccacccactcctctacaatgaaatacaaaagacgaggaaagggtaaaccaaatgggcagcagccccaagacacgggccaccactgcaccgtgtgcaaaagccggcaattcaagacagagcaaggcctgagtgaccattttaaatgtcaacacgccatcttcccatgctctgactgcaacgagatctatgcggctgcagtcgaactagccgagcataggtactcagcacacaacaagggaaccttcaacaaacgatacagggtatcacccaacaaccacttgccaacagccaaaggcaacgcaacaagccgacctagggctgcttcctcgcctgccataccaggcttcctctctacaacaaaggtgcctgtgcatctccgtctcctaccttcccgcactcgctcagcttcacgcacgtaatcgcgtacctttcgcacacagttgtggtccagcaatgcatgtccctcaactacctaatcaagtcccccgggagactgagtaggggcatacagcatgcacgcgcgtcttccgaccatacgctagggtcttcggaccacgcgatgaatccggtcaagacccctatctatcaatgcagggccatcaagtccccgtgggtatgggcttctatccaccgcccatcgaaggccttcaccacctggtgcaaatgtaccaggttcccagttaggtaggatggcgattacgattgggatgtcaagcacccccacacatctaccatacaatgcacggggttggggcttgctaagccgggcgtggatcttcaagatgcacgtgccgcgctttgccagtatataatccaggtcgcagtgcaaatcgaccacgctccgtaccacaacctgtgaaccctggccctggcgctggggctgggactagttcatgggtgtggtgctggatacgttcgtggaagccgctgaggcatgttttcctaatttccccgcgcggatgatgttgcctctgcccgcgcgggtaggcgctgaagattcttacgcgcgagctgctggggatgcggctgcggctgcggttgtgaggaaaatcatgtgctaggcggtgcgcacgcatagctgaggctttgatatggtgtttgtgttcgctggagtgtctgatgacataggcggagtaggctgagtggggtgcggcatggtggagggtgttggcgctgaagatattcgcgcgcggactactgagtatggaaatgttgtgctaggcgatggatgcacttccattgctgaggctttgatatggtgtttgttcgccggagtgtctgatgatctggctcgatgtgactttgagtgtatggcagcatggtggtgcttgcactgttgctgtccatgcctggtcctaaggcactccggcgaatttacaacgagggtgtggttctcgggtcgctgtgagcgaaattatttatccccgtactgatcgttgtctctggtcgattcgtccggctggggtggtggatcatcacgcggattggcagtggggatcacagtgatgttttgaattgtttgaatgaagaaagtcaatttcattgtctcctcgtaggtgaaaagcatgaaaagaataaccacctcctgtattactatgtagaaaaacaaatgcgtaattaagtatggtcactattgaaaacagtactaaatcacaacggaaacaaaagaaagaaacattgcaatattggtgatgggggaattaaacgccaactttacagaaacaggtaagaaaaagacagacaaagcacaagtagacaatcagacagtcaagccaataggagtatgactgcttgaaaaaataaagaagcaaaacacttgatatagatatgagaacacctccattctctatgcatgcatcaaagagcctagaaaccaaaatccagcgctaaacacctcaatccagatggatacataacaagggcattaacgtgttcaaagaatactccgactggcctggctacggcctgcctggctgcgactagccaaactagcacggctgggagtcgtgcgactatgctcgtcttcctcgagaacatcactcagacgcgtgggatgacgatggcgtggtgtcacagattcccacccggtgccggggccccatccagcgccgctgtagtccgcggcggaggccggcgccggcggagggacggacgagggggcagaggtatatgcgctttcgggaatatagtgttcgtctagcagagaatgctcatactcttcgctttcctccgaaggagggccaggtgggtagcttaaggagtcaccatgggggtcgtgggggtagggggcatattcttcatcgcccgcttcgctgctgccgacgtaggagcgcgcgtcaggttctgaggttgcggggtaaggaaccgttgtattgtcgtgtgcgtacagtggacgcggataggggacttttgaggtaggtgggtcaacctttttgggttcgatgaaagggtcggatcctacgggagacatcggcgtgccgtcttcgtagtattgtccggcgctccctgcaggcttgccgtatgcgtcggtgcccacggttgtggctgtctgtccggggtatggaccctcgcgggtttgtgggcgagtcgtgttgtgccgactaggaaggccagaaaccataggcacaacctggacgcctccaacaagtgtgggctctccattgcgcagggagtttgttcggtctcgctcttcttgttcacggcggccaagctcctcccaggcacggcgtgcctcctccttggagatttggagttcgcggcgcatctccttcagcagttcctcggccttgactttgtctttttcagattgctgggcggtagaaaacgcatcggctcggccttgtcgctcttccttgagctggcgttccaggtccgcctgcacttccttcgagcgttcctgctcggcacgggtgtcaaaaaaccagcgctggaacttgcgttcggaggaggcgcgaagacgttgcagttcaaccaccgcgtggaatagattggcaccggcggcagacaagtctgtaatctgtcgagccaattgttggctaatcggatcacgctctagatcctcattgttctgttcgagtttgcgcatccaataactggtgagaccctcccagtgtgaagacagcgtttcccatcgctcgaatgcatgcggaaacccaactcgtttcggctgctgaagagcctggggagcaccttgtcctgcgggtagggcctgggcggatttggagaacccactgggcttgggctgacctccaatttctgccgcactctgcgagcgaccgtgttgaggctgctgagcggttgtttgtggcggccgtgcctggtttgcttgccccgtgccaaccgtcggcggtgcggtctggtattctgatggcctggtactcggtgtattatctggtgctggccggtaaccaggcacagcccctgaagcgacgggtacggtctggggctgtccctcggggccccttgctggtcgtggggctctgattcttgattgggaggcgttttcggcggcaacgccagcagcgtactgttgtgcctgggcctgggcatatttctgggcttctgcctcagcttcagcctgtttttcctccagttgttgccgttccaattcttcctgttctctctctcgagcctcgctttctgctttgcggcgagcctcccgatcccggcgctgtctcatgatatctgtaggtgtcctcatcccactcggtggctgtgatgtccctgagatgggattctggggtacacgggatccgccattctgcccacggctattgttcacaggcccagcgggcccagcgacgcctaccatatctgacatagaagcattcacttcgtcccagtcggtggatagctgcagcggtccacggatagcttcctcgagggcgaaaaggattgcggatgcggtgcgcgacgagaccccggtgtttctctgcggccagtatgaggtatggagaagctggtacggatcgtcgattgtagacccgttgtcgtcggtctccgcttcggaaagggccggacgtaggtctgcgatgccactggctgcagcgcgttgtacagagactggggttgtacgcgccggctggtgtcggtgtggaactggggcgcgtaacgagacagctcgacggtggggcgattggcggacctctgcctgacgggggatacgccgtaagggacgctgagaggcagcgctggagggtctcagttgatgaccggatgaattagaagggcgttgaacagtgggctggcgttgccgcgcaaaggtcgtgaacgttgatgggtcgtaagagtcgtggacttcgtcaggggcttgtggagtgtgtcgagacacctctaagaatggtggataaaattgtggattgggcgacaatgtgagtgtggcgtcactgcttgaagcagaatagcttcaaagatcgcgatcgcaaaattatcgatcgctcacaattcgaggatttacagctccgacggctgtacagaccaatactcgatgcacaaggtaaagcaattgagagaaaagcgaaagcaattcgaaatccgaaaggtgaaaagacgaggaagggtcggacgaggtggctggttaattgagatggctggggctgccgcagctcgagctgcagcgcaccaaacgtgtctcggggatgagcgccaactcttcaagtccgactggccggattcaatgcaaactgatatacggagtaaagacaagaagatattagactggaggaagctgaagggtattccacgttctcccaaggcaggaatgccagcccagtgcctgccctaattgacccaagtctggactttccttccttttttgctttttgcttttttgcttgttcaggctattacgaagtagatccctagggccttcataggctgtatgtcaaatctcaatattgcaccgtcatgcgtccagatcccaatgtcgctacgcaaccaacccgggaagcagtacctcaataattagctgcacctgtactgaaccggtcacacggaccgctgtaggtaaatggaatgtccagaacatgcagtgtctgtgttgtgtatgttgtaggaagtccgaaagataggagaaccctggaaatccttcgggctacaacctgaaatggattcgaggcaattttagtttggctatcgtgccatggttggcattcagggctaacaatgatacaagaatagaactgaatattgtattatgtagtgatgtgttggcagaggtgctgtacgttcagtcgggcaacaatatatatcctggtctggctaagatatatagtcaccatgtcatcatcaattcaggcctaccgggctgtttactatttattacgggcattcatactcctacggagtcctaccgtctgttatatccacaataacgtcgtagttaggctccatccgatccactggctcgttctttgctacttctggaacgaactccattctccacagctggtaaccgtggaaagcgtgaccgtgagaagtaatgatattccaaacatctaggtacatctctacatctctacagcatattgctaattattctacttccaagattctccagtccatatactttacaagttacaacgcactgcccggcatttccccgcaatgacatcttctcgagccctggagtgacgatgacaaagcagcgatcctcgggccaaccctagaaacttggaaccttggaaggttgaaagctaaagatccagtccacagccagaataagccaaatggccggggccccaacacgccaaggtccccccatagtccaagccgggcgtcgcggaagcccccgaagagacccgtcacactacgcgggacgttaaaggggctctaaagtgcggtgcgaggtagcaactatcagaataggagagaggatcagcgtggaagaaatatacggtgactagttaaccacgtctatatatacccaccgaccccatctgggtgctaaactacacacaacagtgcaaatggctagaaactgctccgggggacaatttttgtatggcgatggtctgtgcacgacaaatttagcatacaaagtggaccagtttttcgaatccctaagtgactgtttgggaaccgtgaaaaagatcaacaggtctcgtagtgcggaaaatatatccggtggaatctatcctacgggagtacggaataggttcacatatggtggccttgtagaccatcgattttcaagcaacctgcaactccattggcattattgcacacatttagtgtataaggagtggatataaattctatcggaaaagcccttctcggccgcccgaacctcctccggtgcaaatcacagtggtatctggtttgggacattccatttcttcctacaatattgggggtagttacccgggcgataaaaacatatgcaatagtgaacacaacccctagctatccccaatccaaaacctcaagccaggagaacccaatacaagaccacaccgagaccccaacgagagacacacccgcgccctagaagcactacgaccttagaagtaatattaacccccctgtcccaaggcctgggcctcaggagcgaacgaacagtaagggccacccaaggaaccgggggatttgacacctcagtcgggtcggggaaagccttcccgcagcgtcgcggatgcacgaaacacgaaacccggacggtcgccaggagggagccgaaacccagtattgaggtaggtttcaagcatgccttgcagcctgcagccggggttcgcgggagcttgggtgtttgggctcgggtgtttcagtttctttgtccactgtcttgggatggggctattggccaataatggaagtatgttttgcaagatgctgccgcgggggtgatcattgagatcctctgggaagggatctgttctaggtctgtggattggggagatcgaattgtgcgatcgtgaacgattattttggattgtggttgaggctcttcaaggagtttgttctatcgagggagttgggatggatgttctggattgttgttccattgcccctatgtaggaaccagtgctcgatagatgaatgggctgtgttgcactcgagaacaaatctattcaaaactctatgtgtctgcactcaacatccaacggggaaagaatgtgaccgggaggaccggaggcgagggtttcagcaacgctgagtccgcggtgagctaatcgctcagagatcgcgcacagtgcatgaactgggcgatggagagctattgggcctgcagatcaggggtagtactgggggatgcgctgatacttatacatcggcgggatggctgcacttcggctgtagtacagcgggatgcatgcaagtcagacttttcgatggaatgtggggtttattggcttagctgaggatatgtctctactaggtagtttgttttattttgggctgctttagggcttgcagatttgccacgatgcagaatatagcgatttcggttgtacacaatatgggactgaagacatatgagatggagcgagatctggagttggatacggcgaacacctcggtataattgctggatcgaagtgaatttgtatgccaggtcagaagatgataaaaaagagttcctcgatgaaccaatggcagcacaatgtcagagttacagacgcacaacatttgtgatttgtcaactgtcagggtataactcagcgccttgggtgtccgaccacttctaggaaagttaggatggctcatccgactaaattcaatcgaggcatctaagaattaaggcaaaactagggagatactaggagaaataggaaaccaggaacacaagggagccaagtagtatagctcctttcactcctgcaaagtgcatccttgatattactaagatagaaacagcattaactaaagataactatctagccggccgccagaggaaaaacagaaataaataagcccatgacgtacgtgataggaggacgatttccgatatggaacgttgcgatatcgaattgtgaggctcgaattttaacgttaggaagattaggaatgcccacacagtgttaagccctaacagtgccaaagtactcctaaaccacagctaaagtgctgctcatccaaagtacaaagtgacagagaaacataaaccatatagatcacggcgatcggcgttagtggctgatcccgggaactccgcaccaaattggaggtgatatctcacattttcggtcccagccctctttctgcacagtatttttggagactgcagagagcattatttctttcgactttcgcttctgacaggctgaggacgatttcaaatattaaaaatgagatctggtggtacgaatacctcgtgtcacttccttggcttccataatccgtatcacagatcacagacacgcaggcaacaacgaacacagcacagcgacacagacacgtacaatccacattgtattcttcgggatgtttctcggtgcaggcgtacggatcaagttccgcgcgcccttgctgggggacccaatcgaagggtccttgctgcaaccccatccctacggaaggggaccatgcaaggtcagataggtcatgatcgtctgtgcttctgttgtttacattgtgcattggcatgcatctgcgtttcgagctagccaccgggtcattgttctaaggctctaggtcctcggggttatttttggtataaacatatccccttcaccctggcctccacttcggtcatttcattcctcattccatctctttctctcgtcctgtggcaattctgctctctagacctgtcgtactgtgcctagatcctagagatcttgctcactcgtgttacttctccttcatattactcgagctcacagtcccatggatcacagaggtctttattgtccaggcgagttggacgtgttgtatcaagatcggaacagatcagagactacaatttgtgtcccgtcgccctcacctgcaaagcgaggatcatcttactaccccacagccggcccaaaggtcttggaagagtcgaatcttgatcctttctacctcgaagaatcattggccgctacgccgtcttggaatcattatacatcggacatgcgcaatgatagttttgacgaaagccaatactatcccctttccttgaaccacaacaaggatatccggaacccattacaataccccggaccagatcgctccacacttgcacaggtggagttagagaacagcttgcgattccatcgatacactccatcgacagaggagcacagtccgctgcacagtagccagctgtcattcagctccgtgcaaacagatagcaccactcccgacttgacaccgagcagctccttctcttcttcctacgattcacctaactgccccgacgccgtcttggaggcgacccagcagctatacaagcacgcgaaccaggttcagatcgagcctcgtcgccgccgcttctatctgcctgcatctacaccaccaacatactctcttcccccgccacctcccccgccggtggctcctatcaaccaagatactttccagcactcaaacgattcaactactaccatcaccatggtctacgaagacgtaacaggatcctgctcatcgcggtcccgccgcaggaagcagcctcccgccgttctcgatctgtcgcgtacaaccagttccccaaccagatctcgccggaagcaatccagccctggaactcgccctcctctggatacttctatgatctcccctccatgcttgatcaacccaattaccatggagcctcacatgacccactttgatcaccctctcttcattcctgccaacgacggccctagccccgttcctagtcctgtggctagctccccaccaatctcccgccagtggaccgcaacctcgatggagcggccctcaatctctactatcgacatgttctgtgagcagtccgtatgggagtctgactccgattccgagtctgctggtcgtaaatccatgtcccgtcggccaatagacaccctgcgcaaggttcgcagtcgtgccaagctccgtgccgctaagtcgcagccgagacttaaccagactatgcctgatggcaatgtctttgagcagtttccatgtatgccagaggatatcttgggagagcctatccctgaagctttccgtcctagcatggaccgccccagcactagcaaagaagctgtgcggacacccatcgggctgcagacattgcgcctcgttgacccttcctccacctctctcactcgccctccccgctcccgcaagaacagcagtctcaacagctccgacgttgaccgctccgcagctgccgctttccaagcccagtttcgccgtcgccagcgttccgagtccactgaatacaccaactctgacaagagtgacaaggagaaattgacctcgttttgctacgatcacttctcctcagcccccatcaacggatctcgcgaacagcgccccctcttccaacgtttcatgaactccctgcgttcgttgaactgccagaagccccaaaagtctaagaagaccaatgttaccaccatctgatgcatttacactcggcgttccggttctctgggttcaattttaacggaccaaactatgatacaacataccgacttgaccaacgatccctccaacgatttcataacattgtcttcatgcttccaatgtgtctcgattatcacgaacacgtccattctctcacgctatatctgattctgcttcccgcgcacaatgaaaataatgaatctccagacccgactgtggatggacatagacgcgctcaaccacgttctttacatgcgctatctcgcgccacgaaacgaacatcacgcctggtcctacggaccatgactaccgacttatgactcgataccctcgagctaactatctttaattttcctacctgtcatttgcactctttttctttcctgtcttgactgcgcctcatgcgtgctgtattatcatcgctctgtctaattacgaagttactatttcgaacggtcttcatttttaccatgtctgactgaattatgtctcgccattgctgctacgacaaccaatttttttattcaccttgtgatctataattacaaactagcggaacacgccttttaggtctgtgtttctatgaccaaaaattgcattctctgcactcttgcattcatcaaaagtcgttccactacctcatactctatgaatagacaaaaatagagaccatcacattttacctcaatcatgaatgatcctttgttacttcgttgcctaggggacgaggccgttttctggaatgccagattgcgaatctcagacgatccccaaaggtatctcgaatactacagagtaccgcaacctaacctccttggacaacatccatccgaccgagtaatgacgaccaacaagatctcatctgcctagatagacacgcctcatagcccacgccatgcacggggacccaatcacacccgcaaaccccggaccaccaagggcgaagggagccactaaaccttgccctagaccaggacgaaagctggcagattttgacttgtgcctccgaacgactggctcattgcacggacttggatagcccgacgcgccacgtatgtactgcgttgcgtcatggtcattcctaatctagaacaatccgcagattctctttcggctgtttcagaacactaatatactatatagcgtatccagaattccgggtctggtctgccagcgtggggacactaatgctatcctgcttacctgtcgaattctcgatgcagctattcgtatgtttccccacagcggctgcaccggggaaccgcggcggggatctactggctgcggaggtgggatgctcttggatcgacatgtcgaggcgcgttcggatttgggtacttagggcttggatgccaactgacgactaccgaccgacactcgcgcctcatgtacatgcacaaggcccaactcacatcgaattcctctcattcaaacacaaaaccttctaactagtgcattcacaaaataagtgtctcctacgcacaaaacccaaagaggataagacacatacatcccttgcatgcgcccctcaacggccgccaagcatccgagacctcgaatctcacctcggctgaaaagactcaacggatacttccacctacggactactttgctccctttactttgtgatagaagcttaaatcaagcctaacaatctgacccgccagacaaagctaagcaacccgtcctccttcccgtctccccctcaaccctcgatctgatatcacaagtgcattctctcctctccaatactgctccgtactccaacacgaccgatcttcaaatccccactttgacaggtagcgctagacagggattattcgagccgggccaaatatagatatctccatcccctgggccggggctcttccgtggccacctcacacgcaaggtcgccgatccaccggctgtgggccctttgcatccccgagacccgccagcttgggcgggtttcagatctatcggactttgggctgtggggctagagggctcgatttggtatcgcgtctagaccttcgtgctgttttgttttgttggaggtgcttttgttttgtgcgattacacgctataagatgtgacatgtgactcgtcatttctgcctcgtgtttgacaggcgcgatttgcaggttgctttttttgctctgacgaattgtggtctattgtagactacatcgataattgcgctggtggctatcgttaaaaattcggcgaaatgtcgctgaattcgcagaataaagtcggatatctaatccgacacgaacaccaccatggcaacagccgtgcatacagtagtgggcagagccccagcgtcagtgtgtcttagagaagcacgatcattatcccaagcaaccgagaacagtaggtcggaccggccttccgcctagcccgtccgccgcatcaaccttgcagtggcagcggagactgttccaaggctctggatactcgcatcaccgccgcaggggtgatcctgcggcgggggacgnnnnnnnnnnnnnnnnnnnnnnnnnnnnnnnnnnnnnnnnnnnnnnnnnnnnnnnnnnnnnnnnnnnnnnnnnnnnnnnnnnnnnnnnnnnnnnnnnnnnnnnnnnnnnnnnnnnnnnnnnnnnnnnnnnnnnnnnnnnnnnnnnnnnnnnnnnnnnnnnnnnnnnnnnnnnnnnnnnnnnnnnnnnnnnnnnnnnnnnnnnnnnnnnnnnnnnnnnnnnnnnnnnnaggggggtggccgggggggggggaacgagcagcggagaccccgagagacagtggaccgcactctgcaggaactcaatcctgcatttgcacctgcaagacgagaggagaccttttccctcctgcgtccctgtacctggaggggcattgttatgtagatcgccagtcaagcacagccagccctgtgtcgtatccatgacaaagacatagtgcaagccgtgagaatatctgcacaaatccaagacaacttcaactgtgttccacagcctggccctcgcccttgcccttggccttggcctcctcttcttcctccttcttctccttctccttcatctccaaagcctccatattctcctcccacctcggaacctcaaccctcccctcccacctagcaacaacaacatcccccttccgcccaagttgggtctccgcccgttcctcctccccaccctccgctctcggcgcaatctccggagcgccatccgccccagcaaaaacagcctgcacatccagctccttcagcgcagcttcatacagcacccggatctgctcccttttctgtcgcctcaattccccaatttcagtattgccatccttatccgtccccgtagatgaagcggcagaatgtcccgtccgcacagccggcttcctcacaacacccggtccactccgctcttcgaacccgcgtagtagtccttccataattccgagtaccgtaccggcacgcatacccagttgcgcaccgacggggaagcctccgtcgaagccttcttgcacgtgcgcgcccttggaggcggacgtgccgtcgcggtagcctgctgtgacgtgttggcggcggaggctggggaggtcggagggttcggtggattgggggagtgggcttgtggctgatgggtgtggtgcgttgagggtgctttcgtatggtggggaggagccgaagatgtcgtcgagggagttgtcgtccactgcggggttgtcttgggttgacattgttgttgctggggagggtggggtggagtgggcagatgatgagtctgtgtgggctgtcattgcccaggtagtatgggttttgacttcggttatggcttgcgactgtagaggtgtcgtgggttgatctgagtttgtgaggtctgagttgaaaaaaaaaagatagcgggtcggcggggcgatccgttgatccacggaagtatgtgtatggagtttattttggagtgtttatgacctcattcaacaagtttacatcatatatatctaggttatatagatatggatacttatgtgaacaataggactaatatggtggaatgtacaggtgagttattcacttcgaccgggaatgccttccgcctgatctaagtgaagagatttctttgctgaatagtctatccctattgatcagatgagagttagcaattgctgcgtggaaatgaggctcttcagaatagggcaaaataggtggtcacgtacagttctgaaccttttgagcgataacctttcttgcaggcttccaaaataactccaaatctgcacctgggcgaggtttagagaaaccaacctcgacgacttgaaacaacacatccttgctagaaccttcgattttatcaacatctttgttggcctgggtattattaaatgcaatgaattccctggttccgacccgaacagcattcagccattcgagttgttgctcattgccataaaaggcttttgacataatttcccaatgaaaaaccagaaaggccaaggcttgttgaagtcgtaaggggttccagagatggactgcatgattgagtccagtctcttgtcagaaagccttatacaagatgagattcttaggaagagagaatacctggagggagatgttgcttactgaacaacaacatgagtgatatctggtagcagtttggaatttgtcctcgacaattatcttggctgaaggaactgggactgttatggcattatgatccggcagtgtttcatccattgtttccgtactctgtaatgactgtcaaatcgttgtctgttactccgtgcttactcttgagtgttacgaggatacctacacgtgaccaatattatgccttgttctcaatttcggttggcataaggaataaatcagtgtatctactgtcactaggtcaaaattctctcgaacgcaacccggcattcttcagatgggtttcttttctacctcgaaccgtgccgattccttcattgcagccggtacaacctcaacaatatatgccgttgacgaaaactttgtcatcaaactccgtccctcatcaggggattttcagcgccaagcttacgacactgaagttcgctcttacaagcgacttgggcaccatggacacatcgcatcttgcgaagtaaacgaggaaggtctcctactggaacgcgggatttgtcttcggaccatacttcagagtgctggaagcacttccgatggaccgtcgaaagccagggagtctccgatctctttagctacgaaacttcaatgggcgcaggaagccgcggatggtcttgcatatattcatagcaagggtattgtccatgcagatattggttgtcacaatatgactgtggacaactccaaccacgtcaagttcattgacttcgctggttccggcatcgacagtgaagccccgttagtctgctacgagtggttcagcttccaacctggtaaggaaatcggtgtatgcacggatatatttgctttcgggtcaatgctgttcgaacttgaaacagggcgtgtcccttatagcgagctggaagggactatggagatggggaacctaattacagttgttgagaacttgttcgcacagcggcagtttccatctgtggagactttggccctcgggtctgtcatttctgcttgctggaatggcaaatacaattcaatggaggaagtccatcgagatattgcgtgtcaaagtaagaattattcagagaaaagcctgtaaggttcggctgttgtgagttggtctaagcgggtcggggcgatcaatgaccaatgctatgttgggccatcttttgagactttggcccccaagcgcatcagatgatgtgcccaaagcagttagcaaccacaagcctcatgttctccatttcgatttacatgaagtctcctaagtgacaaattcacagccatgtccagacgcaccctccgtctcctaggctacaccaccgccgtcactggcataaccggctacagcatccaccgaggactaagccacctggaagaaaaatacccagcacttccccccgcagcaggcagcagagccctccgcacaccggagcacccaaatacacaacgctgcgcatataccgacatctacgccgcccaaataccgctacaagccctcgaagcacgcatcccaagcgccaagaaatcatcaaaaacagagctcgagtatgcctgggctcgatccgtgctcgggagcaagctcctacgagccgagggctctatcctcggactactcacgagcttccgcttcacgccatgcgatacaggcagctcgacaggaggattctcgccggatgaaaccaccggtgcgccgcgcgttctgctgaacggtttatttcaagtacagcgccttccggccgctgacgcggatagcaatggactgctagtctcgtcggaattgcccgacaagtcccgcgtgttctttgagatgattgcgcggtgggggtatccttggcgcttgatgtcgtgtgtgaaacatgagatgagtgtttctgagccgttctggaagaatggtcaggggatgtttgttgaggtgcggtttgcaagtgcgcatgattatgagattgtggatgtggaaggtgagcttgggaaacagaagattattccggattggactttgaggctgcatcgtggatatgctaggttaattcttgattctgctgttcgagagctgcaacgggatgttgaaaaatagtctcgctttcgtattgggctctcttttatacccttcgccttccaccttggagagctgaattagctgtgggtatacctcaggcctgctaacgtcggacactttggtttatgccgtaatttggtatcagaagatctattgtacactcccagggagcaatgcgacagccataccttggacttgcgatgacattcatctcgtacttagctcttcaacaagcactatatccaaacttatacacatttatctgatacaccatatttaccacgcggtatcaacatatctccaatgatcaaattctactctattcctcgccttcatcgtcacccgcatccgaaacacaagcactcccatttggaacaacggtccacgactcgaacccattgtacaaataacacacatcccagccgctggtaatgctccctagcagactatccgccccaccggagcaatcagacgagctgaacatgcaaagatcataccggttcacgtcggaggggctcttccacgagagacttttgacattcgttgagttgtagtaggtagtatctaacccctgacagtcgagcgccctcgcgccggagtagtggagaatagagtattggatattgttcacggagctgttgcaggccgggggtgctacgctgaggaaacggaaatcccactgtgaaccattagcaggtttgatttagcataattgtcggaatccggcgcgtttgacatacggctctgtaggcaagaactgtgagatcttccgggttgggtagtgcgttgacggtccagggagcgacgctaatgagcgtcaagcatgtaaggaatttcattatcttggcagaaataagactaaaaagcagggcttgggattatgcagatataaagtacaagctggagggaaatgtttatttgagatattcaggacataattgcttcttattatacggagtaccaccactcgccatcccattcagactattttaatctcaaacacctctgcacctgcagaagcggagcctgtacctccaatcacagccatcgacggccaggagagactcgatcggctcgatggccactcctttcagctgcagccagagagcagctgaaagaacatggccaaggagaagccaggacggagtaactacggggtactccacagaggggtctcgggtgagttttctcttggcgggggaaaggcacgatgctgttgggctctcattgggcgcgatattggcgagaccctggttcctgtgttcctggagggtccgatcggatatcctgcggctcacctgatctcggtggaataggatgaggtatattgaggttgttggatactcagtacatattggttgtctcgccgatttagaaggatgagcgttaacttggctcagggacgactggacgggattgtgtgcccagacatttatcgagacaccgagctgaggaacggcgaggaaaggaagtacaaaaaccgcgaaaaccttgaaattggacaaaagaagcttttttttttttaatatactatctttccggagtaacctacggagcatacaataatgcatcatgcattgtgcttcgtgacaaaaaccatacgttggtccttcaggacactgtaataacacccaagctggtgagaaagacgcctcgtctaaattatttatctattcaatctatagaatatcccagacagatggtgtacaaagacattataggccgtcacaacacaccaaaaccacggagaactgtctcacccgcgctggggattagacgtcaaccgccaagcccggagaggcaagtcctgtagcttctgcgcagccggcttgataaacataatgaacgtgagcgtgccaatgagcacacagagtatgttggtcatatagtacccatcacggtcgatgtggcaggtaccgccgccgttcacgcagcggttcttttctggctcaagggcgcaggagaatgccgtcgtgataagagtgtctttgagagaatcggcgggtggggcgatggttgggggaagacatgttgcttgggtgaacatgtcgacgagtttgaggacgaagattcgggggaatgttccacccaggttgcagacgctgagatgagatgttagtaatgtgtgcatgttggggggaaagggagtaggacttacgttgcgaggagggtcatgtacgtcccgccaatggctgggtcggcgattcgcgcgtggaaggccgagatggccacgaacatgaccgtgttcataaaggttgagagaacatgctcgccaattaccgtgagcatgtaccacattggcatctccgaggctgtgggatagatcatgaccgtgaattgagcgagcacggcggctgctaatcgtccgataaaggcccagccccagaggcgcattgctccgtagttggttgaccactggccggcatagtagcccagcatgatttcaaatgggaagtcgatcaacacgaccagggccatgttgtcttggccaaagcccttgtcgaggagcttgagactagtgactccgtcattggcctggaagccgatcttggcaatgaggtgaatcaggataatggtctggatgttcttcaacttcagaacgctccacatgcttttatacacatccataatactgtcgcgttctttgctgcgttcttccttcttgaggaaggccagaccacacgtcacgatcagatacgcccagccccagaagttgagataagtgccgagagatagcagaccttcctcgccggggatagtgcggaaccatctgttcgcaaagtccttggagttgaacgccaagaagacagtgtaggacaggaaatggcccgccgtcaacccgaccgtttgggcggtcgaggcgtaggaaatgttcggtggggacatcaaagtgatcgcccatccatctacagcgatatcctgggtggcacagaaaagcactagcataaaccaccagtatgtgaatttccagacgcccgcgccattatccgcgccggcctcgatcatcatattctctatatggctacccatatagatcatagctagtccggcgatcacctgcacgggggtgatccagctcttgcgccgcccaaagcgcgtactccacacggcatcgacaataggactccagaataacttgagcgagtatgggtatgaggcgagcgaaaatattccgatctggccgtatgagaggtacggcttgagcaggaagggtacggagccggtggccaggcccatggggattccttggaggaagtacagcaggaccagcagcagaaaattgcggcgatcactgcgcggtagattgtggaacgttgtattcgtctggattggggtttgcggcaccaggtcgttgtcgagggagaagctcggtcgcgacataagttgggctgttctatcggctgaggtctctgcggagggcgtatccctcctgcgcatttcgatattgttattcatcttgccattcgcacgtccgtttgacccggtagagactgtcaggttcgctttggaacgccgcttcgagagggtcgcgtgcttgcgtgtcattgaatgctgtgttatggtagggagcgatcgcctttgtcagcttcggcaacttcgtcctgattggatcgaggactgaagttgggtattatgtattgaatggtgaaagggatggatcgagggttcggcttcgaaggggctgcgggtttagatgctcagggtgtgctgtatgttaaattccactgagaatgaaggagtgaatgaggaatataaaagaaagaaacttcagcgaatctttagtgggggatcgttgaaccgtaggatgacaaaaaacatgaggcaagctggcctcttggctggctgcagatccggggacccgaggggttctattttaatctgcctggatggaaaatggtcgatgggaatggacacaatctgagtctgagtctgatattgatgtttttgatatgtatattctctcttgtaacacaaatagcacgttccctatgaggtcaccacatcaacacggtaggactgcaggggtcagatctataaacccaaactccaatttaaacacctttgaggcttagtctcaggatttcttcagatcttgcataagaaaagaacaaactgatgatctcagcccactccgcccactccgtaagcccaagcttctgcagaatcgcgtcagatgttgatgagatcacgtgtcaaaataaactatgacaacataaggatcagaatcaccgcgcgaacctcaccagctccccaaccaatatccaaaatgacatctcgcgttcccacatcaccagagccagaagaagtggagctagacacagaaatcgcctcaatccgcgcagaaagtaagcatcccaatcccaatcccaatcccaatccaagctaaatcaacaaagtccaaaccctccgaaaacgcaagcgcatcctcacatccagcctcataacaaccgacacaattcaaaacctcctcaagaaacctcaacccccaaccaccaaaacaaccccaacagaccccctcaccacaatctccccgctcgtccacgccgccggcgcccacacctcctcaaaccaccaccgcatcgccttcggcgcaaccgccttcccattcaaagacccatccgcaacagccagcgcgaaacccctcctcggcgtgcgtatcgacgtatgcacgcgcaatggccgcttcgcgaaaccatactacatcctcctcaaacaggagcggggtcgcgcagggcccgagtcgggtcccaagatgttgaaagtgcatcggcatacagtgccggggtttatatcgatggcgaagctagagggtgtgtatctaccgcggcctggtgtgatgcgcgacaatggagatgcggatggaggttcatctggcggggatgaggatgaggacgctgaacctgtgaagctggggaagaagagcggccggaggcaggatcttcgcgggtttgtgcgcgagcttcggagggagcttgttgcgtggcatatgcgtgttgatgctgttgagttcctgcgcgagaaattgggccttgttggtgaagacggcgggtccttgccgtttgatgtttcgccggatcgcgatacgggcattgtgtctttggctgctgttgcagttgaggcgcggtatgtgcgtgttgagtgggttgatgggcgggttgggcggttcaagttgtctaatgctggagtcgtggagcgggcggttgttattggtgatgagggtcgggataagaaggtcgaggatgcgatgactggtggtggtgggcgggttgagacggttttggataggttgagggttgatgtgttgtctggagcaccggcgctatgagatgttgttttactttgtttttcagcaagagataccccaatgtcaattttgaatgttcgaagcaaattaacttgaattccagagcagctaaattataaacaggttggtatatctattcaatggtctccaccaaatgctacgcaatcatgagacccagaagccgtcgtgatgcgtgaatgtgtactccgtacgtgactgtcaattcaaaagcagaaagtttattacaagggcaaggggcaacatggacagaaggatggggtattataagggtatatagagtagatgtcgtgtcgtcgtctccaattagagaggcacacaatccttgggatggattgtatcgggggttgaatcgggggttgaagtttctagtggtgagcgttccttaacagaaatgggggtattgggggtagtgaaagcgacaagcggcaaaggaccatatgactggccatgtcgcacctcgagatgccgacgtagcacagcctcttccaaataccaacggtgccgtagagtcgtcttcttcgtttccagagcttgcatgagagagtttacttctcgttggtgctcgagctgcaaggccgcagcatctttgatgtgtcgtttacacatttcatccagttctttttccatacgcgcggtggcttcctggagcttgagctcttggcggtcacggaggactttgatgcgggcgtgatggagctggtccatggtcttgtgggagtggtattgttgttctagctgctccatgtgtcggcgcgtgagcacacgagctggcgcggtagagtcggattccgagagagattccgatgaccgttcggatcgttcggatcgttcggctctgatcagtgttccggcgggagatggcggcgggctggcattgcggagatatccttccatatgcttgatgcgggtgcgcgagttcattttggcgcgatcgaactcgcgttgctgttcgatttctaccgccagctgtcgctcttcgatttgggctatagcttggatattctgcacaaacgcttgttagtaaaaataaattaagatcccaatgtcgtaaagcgaaccttttcgcgtttctcatcctcctggcgctgattgtcagactgttgctccgagacagcggtctggtgccgacgccggagggtacttagagcggcgtgttggaaagcgagatgtcggttcctttccatctgatgccgctcatgcatctcgcttaagtccggatcctccagacttctttgtagttcttctttgctgaaccgaggtatttccaaccggggaagtgttacctcattgctcgcgtggggtataacattttcatgggcagcaatgacaggttccggcttgggttcgaagaaaacatgttcaaggtctttgtcgctcgtggatacagttatgcgatcttccgaaggcaagaaaatggccgaggacgtgcgtttcttgcggaaattaatcctcccgatagcagacttgaagctgctccgtcgcctccccttcttgtcgtccgacgcgacgctgagaattgaatgccgatgcaagttggcaaacggatcattataccccggcgctaaaaggcctgttctcccctcactggagcaaaacgaagtcgggcgcgtagacagcgaagccagcgatcgcgtactgccagtcttgatgcgatccgaggaaagcgcgacatccgacagcgaggagacaatatcatcgagcacggatggcacgggggaggacggctcgtgggacggggtgacggagccgcacacagaattccgatcggtcgacgatccagaagacaggactggcgaggaaagatcgaccattcctgaggcgatcgaggcggccagtggcgcagaagctgcgatctctggcactttcagacccagttgttgagcctcctcggctaggtgctgcgcctgcgctgcctcggattccggggaggggtggtggaggacatcggtgcgatattgggcctcatcgaagatgggcccggtgtgtgactccattgtatgtacaattataggaggtatgtggcgcctaaccagcgggcgcacatgaaattccaggtccgggagagagctaagaataataccggttccacatggatgcgttctatgacggcatccagggaatctaaggatgaggggttgtaaggacagtattaagagttgaagggtggaggtcagaggtccaagctaaaaggttcggggccgaaaagggtagaaaggggaaaacaaagcgcagacgacggttatggccgtttccttgtttcctcatgtttggtcgttttaggcaattttgggaaaaaaaggaaaataatcacctccgacccacgggtggtcctgacgccatccatggttctacgccggggatcgcagtgaaacgggcaattgcatgagagatcgatctagctctaacggttatatcggctttatgctttatttacacatccctgcacctgcattcccaaggtatacgcttccatacgctggatcccgggcatccctacggatagataacgcccctcgatccaggccatatgaagaaggtagggcttagggctacttaaattgcctcggtcccatggaaaggacggatcagcccatagatcaggccatttagagacctcctatctaggtagttcaatacaacatatgtatgtagccaaggaataaccctactcgttcaacatgtcgcatgccagttgataggcccgctctttagcttggtattgcggagtccccgccctcgtctttttatccttatcccatccatgactacaaccccgcatgcgctcactgaccacatgccggcctggcaacgtcttgatcctctcagccaattcctcgccctcgggtgcgagagtatcaccatcggcggtgatcattagaacacgtcgtgggaatcgatccgccggagcataagtcggtgaaatgcgtgggtcccgcttgtcgaaggatgggggtacgtagcagcggtcgaagaggcgcatgagagcaagaggaatgacgaaatctgcacgggccggggcgatctttgctccaggatcagagcctatgtcggtcacaggatagaatgctagcagggagcggaaggtctcgggagggaagaggtttgacgcagtcgccagcgcgaggttggccccagcactaaatccagacatggatactcgggtgaggtcgaattcatccggacgcgtgagcacgtatttgacagcgtcttccacgtcgttcagtgcggcggggaacgggtgttcgggggccagacgataggagacgtctaagacagtgtacttcgtttcctggctgattcgtcgacaaaatccatcgtcgccgccatggagcggtaccaagaagccaccctcgtggaagttgaggaggacgggtgacgggcctgagtcagaggactgatacagatgaatcttgatggttcggccagcatcccgggatttgatatggcggacttcatctggactggccgataccttcatggtaagacgcaccattgtgcgaacgagaaacacaaagcatttgttatagtagtacatgagaatatccatggttggcgtgagatgctgtatggcgtgagacgatgtagtagttatgttgaagctgagtctcaccggaggccgggatttgaaaggccactgctgacctcccccctcttctagtctattctagtttctgacatcttacagcccgtagatatccaattagaaatgattaacatgtactttttcttatttctacctaatatattccacccaattataaggcatattcaggccagaatctcaaggcacccctgcattacacagtgtaactttatccggataatctgataccttcatcccattgtttgcaaataatctacttgtataatctccgtgatgtgaaccatagctgttctagtgcgttggtatatctcaccgctcgtggcggtattgagccccttatcaattagctctcaattccccgcattaggacaattccacgcagagcctcattgccttccacgcacccgtccaccaatcagaatgaccggtttctgtcgtcacgctcatctccaacacccatcgccatcgcatctatcgttccccttttagagacccaagttgtctgagaaacaaccatcctagtttccaagcccacgacttttgagtttcattaaccaaacaaagactacttaatgagcttggacaggagtcctgagagacctcgctttcaacatcatatcatctacacgcgattttaggatgcccgtcaacactaatttcacagtcttcatacgcttaccatttccaagaggcgactttgtcgatccgccacctgcaagtctccccaaaaagacccctggagcatccactgacataaacaggtggaatggaatgcatccaaagatcaagcattatgggatatcctttctcggccatctaaaggtgacatagactgtatgtattggtgttgctttgagaccttgctttgatatcgctgacatcatcacagggaaagctctgtaactggactctgcccctgacactttagcttggagctgctaacacgcttgtttagggcagagaacttcgatgtcaccttgcagttcctccttcagcaggcagcatggctctatgatcgccagctatcgcaggttcgggctcaaatgcgcaaggtcggcactacacagtcgaactccccttccccggctccaggatctgtgtctggtagtacagcattgggtggacagtcacagagagaaacaccagcaccaggtatatcctagcttgctttatgttctttcttgtctatggtctgagactgatgaccagcaggttctcgggcgccatcccggcaagtatctcatccgaaagatatccctctacgaggtatggaccgaaaccctacccgtcttcgcacaggccatttggtaccgccggtggatcgatcacgtttaacattgactgcagcccctgagaaccgacgtaccagctttacatcaactacgcctactaacctcacccgcggacctcgggaccctacacgcaccgccacgccgacaatcgatgacaaagaatcacgctgggattctttggctcaccggccttcggctgtgagacgagaacaaccaccggtcgcgtctttgcccagatcttcgccactcgaggaagagtctctgtcctcgagctcatcggaagaatcagcatccgacgacgataacacaaacagacgtgcacccctgttcaaacggtttggcaaattttctactcatcgtctacgggatgatgaggacgacgaagaagatactccagccttcctgcccctatcccgcgaacatgggcgtatccatcgggaccggtcaggccaggaactcagcgccacactccgtttagatgccgagcgagcagcggcgcaacggcgacaccccgagcagcggcctaatcctagggtaccggcaccaacggactcatctacaagctcaatcagctccggtggacgtagcagcctacccggtggacccaggcggaccagccaggggggatcgatgctgagccctgccgaacgccagaattcgcgcaagtccaccgcctccggtcgcgaagctagcgatggtactcccagcatgggaagcagcttcagtgacctcgacggtatgtgtcccaacccccaggattctggatttcaactgatcgactggtcagatgcaagtgttacccagtcagccctggaggaggcccttctaagcaacatgcagcatggtggaatggcgagtcggatgagcactatcagccaagccttgcgcagccggtatctgcagtgaaatgcatcttacataggaatatctattttgacaggttgcactacaacgtagtatgtgtacaacatatgatgtagctcatgtggggtgcctgactgtgttcccgcatatggcctccacgtgaccgagtggcgcctcggcatctcggtggtacgttccagtgacatagtggcattatggatatcttcactttgtccggagttccctatactcagatattccaggtattcactgtcacgcatcggtcagacgggagcgctagtgccggatcaggtcgttcagtctcaacgcccagaggagacatatgatggaggggtagctcaacctagctacctagttacgtttaaaacgttgaatgttcaacataaagaactgttggatattgtgaataacgagattcttggccgatcctgaaaagctgaccggcatcaaagaacaccgactacaaccccaccaaggttaggacgccgagcggcatcctcggcatctcgtcgactacactcaccggcagttcttcgattcacaattgtccaaccccttttctccgttgcaaagcgtctataccatcattcaaaacaatggcacccccattagtgggcgacatgcccccagcggaggcagagtcggtctatttcaatgaataccccccaccaaaggcactgccacgccatgaagcgctcgcgcgcgcattcattgacctgcacgtggaggcacaccggcgtgtagtactcgtcacatctggaggaacaacggtaccacttgaagcgcaaaccgtacgattcatcgacaacttctccgccggcactcgtggcgccacatcggccgagtacttcctcgagcaggggtacgcagtgatcttcctacaccgacaatacagtctgctaccgtactcgcggcactacagccactcgaccaattgcttcctagacttcatggatgagaagccggcgtcggcggactcctccaaccctggccatggacccatcatggtgcgcgacgagtaccaagacgagatgcgcagcgtgctgcggaaataccggtatgcgaagcagaacaacctcttgctgctgctgccgttcacgacagtctcggaatacatgttcgagctgcgggcaattgcgaagctgatgcggccgcttggctcgaatgcgctcttttacctcgcggctgccgtcagcgatttcttcattcctcgcagtcgcatggcagagcacaagatccagtctggggagttgcctccgcacatgcagggcagtgcaatctcatcggatgaaatctatacgggtgagaatgaagaaaatccttcgcatagccggaagctcgtcgtcaacctcgaccccgtgcccaagttcctgcaccagttggtagatggctgggctcccgaggggagtatggttgtttcgtttaagttggagacggatccgtcgctgcttgtgtacaaggcgcgcgctgcgctgcagcgctactcccaccacttggtgattggcaatttgctttccacacgcaagtgggaggtggttttcattacccccgatgagccgtatgagcgctggcttcgggttccgaagtccaaacgcagcaagagtatctctggggttgaggatcaggttgggttggcggaagctaataaggcggattcgtcgacggtggagcagacggaggctaaacagattgatgagaacagtcgggatggaattgagattgagagtctcattatcccggagttggttaagctgcatactaaaatgatcgagaagaacaagcaacctgcgcagtgatatttcttggatgtacaattcaatgtgaataaataatgagtcttctcgggtcttttagttgaattaattaatactgacatgggttcgatgtagtactatgtatgtctatgactttatatatcattcttacagctagatcgttgcatgcactcatttttgagatattcaacccgctatcagtgttactcacacactatgaactattttcctttttgtgatgtcttctatactgcttttgaaggattgtatcaccatcattgaaagactgtatacgactaaatcgtgtacacttaggtactttctgtatatgtatatgtgactactctcaactcttgaatgcttcagattcgactactcaacacgtcatgatatctccgtgctgatcctggtggaccctgacatcgtgcgggaccccggagctcttcacccctgaagtgaagccttggaatatctctcatttatagcaagggatcaccatatctcaaacaacatatattggattcaaggggcagctatttaaaacctccaaattccatctgggctacgcgtcccgatgtgtcagcggcaaacttcggcggcgatcttccttagctccgacctttccccagtaatttgctcttttggttaacaggagaggggggaaaagatctattttcaagcactgttctggagaaaagatgatcaattgatctattctctgtttggtgtactcaattttctcaggatggtgtcccgccggttcagccgtcgcctgattgtagttgcaaccgtcgttgcgctcatcttcctctacaatatcggcttcctctccagtcacaatcgccaatggcgccctcacttcacacctacgccggaaatcaccccggccctcgatgagaatggtgaaccaaccacatactgcccacccctacccggcgtcgaagatgtgctcgtggtaatgaagaccggagtgaccgaatcgcgcgagaaagtccccatccacttccgaacaaccctacgatgcatcccccactttgtaatctactccgacttcgccgaagaaatcgagggcgtccagatccacgatgtcctcggcaacatggacagcgccgcaaagaaaaacccggactttgacttctaccaccgcatcgtgaaatacggccgcaagggtctggagcaacacgatttctccgacgaagccaactccgccatcggaaaacccaacaatccaggctggaagcttgacaaatggaaattcctcccgatggcccaggaagcgctccgctacaagccggacgcgaaatggttcatcttcgtcgaagcggacacgtacatctcatggccaacagtcctaacctggctggcccggttcgaccacaccaagccacactatctcggcacggagactcagatcgcggacgtcatcttcgcccacggtggctcgggcttcatgctctccaatcccgccctacagcgcgcctccgacgagtacaccgcccgcgaggtcgagctgaacgaatatacagaccagcactgggccggcgactgcgtgctgggtaaggtcctcagcgacgcaggcgtcaatctacactttacatggccgatccttcaaaactccaacctcggcgaactggacgagttcaccacggacttctaccgaagaccatggtgtttcatcgccgcaaccctgcaccacctctccccaaccgagatcgagagcctctggaaattcgaacaaaagcgctggcgtgatgtgagtgaacccaatccattctaccactccataacattgaaaaaaattcctaaccaataacccattatagaaaaataaacgcatcctcctgcacagcgacctcttccgcgaatacatagccccgcaaatagaagcacaacccgcacgtacgaactggaacaacatggcagacgaagaacagcccttcgcacacacacccgacgactgtcgcttgatctgcgagacgcagaccacttgcgtgcaatttgccttccgcgaagataaatgcttcacgagtctcaacccgcgtctcggacatgccgttccgggcggtgttgcgacgtccggctggaatactagtcggatccgcgatatgacggcgaagaagggagtttgtcggaagcctgatttcggggattgaggtgtaccgtgctgagatatttttgggggtttttttggtttccgggggtgcgtgttattatatgttggttttttgccatgtacgtggttttcttatttgggtttatattgctttgcatcgagagcgagaaatgggcacgatttggcgattgcttgggcttggagcccggtctgatatttggcatacggggtgatttgggtcggttggaacctgcatttttttttctcctctgtgcatgtactaccatcttctgggacctgtggctgatgatgagcttgaatagacaagctgtgttagtggcgttggtgcttggttgaacccttcttatatacttgatcgctcaatacacatcttgatcaaattacacagaaacccatcttttcctgtggaatcacaactttgcttcgtcattgatctactgttcaacgaggtaactggaaaatagcaagaaacgaataagaatagcattgcttgggcgatgtcaaccaccaattaggagagagtacactaagaatatttacaggacaagtcctgctgtgcgtctgtacagatttcacggcgttatccattcacaacgggtggagcggacgcatcctccatacactggtcgattcgcatgatgtggtatccggctcttttgacatgccgaatgaactccggtagatacccaatggtagtcggattcaggtagtgcatgacggcaagattcccgcccttgccaacactgcggacgaaggcttcaagctgcttctctggggtagttgtgtttgcccatagccagtcttcgacgtccacactccagttcacaatgtacgggtttggtatgtgtcgggctagctcctggcgcatccgggcagctactgtaccgaatggtgggcggaagtatgaagctacaaatattcactgtcagatgattctcggggatgcatcaggggcaaacatacacttgatgtccagccggtccctaaagatttgcatggactggatgatctcgtcatcaatctggctgagagttggcaatgcttccatccttgaatcaccatgtcagccctcttcacatgaaaccgaatatttggaatagacttactttgggtgggtgttcgaatggagcgccacttggtgacccttcctcaacatttccctataaaactccgtgaaattggtcgtccgatccctgagcccagcaccaacaacgaagaaagtgacccgcacatcttcgtcgtcaaggatacgcatgacctgctgagagtactgcggctgtccatcatcgataccaaatgcaaatgaattcggacgcgaacaacggagaaccaatctcccactaggcagcttcccaggcacccgataatgactattctcctgcgatggcgctggaacattaggcacgatctccacatgatgcagagtcagaggttccttagtatagaagccatggaacgaaatcgacaccacgcgattgaaatcgatattgaaatgagacagaggtatatagagctcacgagggcctgctggaatgtgggcattgccatgggggcgcttgcgtcgaccgcccttgtgttttctatgcttgtgcttcttcctcccagcatcggccttaacatcgtcatcgtcatccgagtcatcgtcaccatcttcgtcccaatcatcatccgagtcataggcttcagaggcagggtgaaccacataccgctctgcctggacggagtctgcaattccggggaagggactgcgttgagaactacattcgtcgttgtgttggttaaaagagacactgtacttatccgtgccttcgaatatgacatgcaagtactcgttgtgccagggaaccaggctgtagcaggcgttggaatcgaactgggtatggaagttctcgtccgggtctgttgggaacagacgaatgaagcccggtccatattccacgggtaaatcctcgccggaaccgtgccagaatcccaggtcgttgcgagttgggtttttgaaagtgtcgatgacaaaaggggcgcttgacttctttatctgcgaggcattggacgaatctctgtgggtaagccctcggagttcattccagtggccatggtcaacatttccgtgaaatacagctgaggttgggaaggatagcgaaagagcggcacaacctataaataaccaatgcatgataaaaaactgccttgaaaaaaagattgaatgtgctttgaagaggtcaaggtggaagttgtaaaatgcatcgtttatgtactcggcgcagtctgcctgggcaaaaagtcaagaacgattgactacaaatctaaaggcaggagctgtatgtcccaagtctgtacatctctacatgcctactctctacaatttaccagggaattgaaaaatgaaactagatagttgcataaaacccatgaaatccgtaaagcggcacatctgtctgaccttgccatccatatcactgcattggcactcacgctaaaaccgatcctgatccaagatcaaggaggaaaggtcttatgttccacagatccaggttgcatatcgtcaagagatcaagccctcaaaacttcttcggggtgtgagatctgatcctggtcatccagggtaaaatttcgaacttggtaaaaatcatcctctccaccttggacttctttcgtttccatttttttgttgaattttctgttttttccttgtcattgtcgtttgtgtttgttgagaaaggtcctctaggcccagaattcgtcatcttccttgggagcaggggccttgggggcccagtgagaaccggccagaccagccttgtccttgcgcttggctttctcatcctgctgcttcttgtgttcgcgaacgggaaggttcaaggcagaagcctcctcttcctcggacttaacagtgggcttggcaatagcgggttcggtaaaagcgggatcgtcgttgtaaacaaaatcctcatcattgacaggctcgttattggcctcttcagcatcgcttgcagccccgttagcactctcctcaacctcgtcaggttcagcgaaagaagtttcttcctcagcttcagcatcagcgtcagcattggattcagcatcagcgttggattcagcgtcagtgttcgattcagcttcaccatcagcgtcagaaccagcgttagatccgtcttcaaagaattccttatcagagtcatcgtcaaactccagaacatcgtcctgagggcggtatgattcgaggaattccgggacgacttgattgcattcgaccaggatcttcacaagatcctcagcaatatcctcatcgcgttcattgtagaaagaggtggcgatgccttcgtttccaatgcgagcagtacgacctgtgggtggcaaagaaaagattagtggcaagttcatcaggagtatcggggaaaagcaatatctggagtaacacataccaatacggtgaatgtattcagtgatacctccgtgcgccgcgctggggagatcgtagttcacgacgtggagcacgttgatcacatcgagtccacgagcagagacgccagtagcgatcatgacgggacacttcgcagatcggaaggcacgcctaatttggtgggtcagcaaagcaaaataagagagggcagggaacaaatactcacatcgcatcctcacgctcacgctgagtccgtccaccatgaatcgaggtggtaggcattccagagttgtaaaggtaatcatcgacaaagtcaacctgatccttgctgttgacaaaaatcaaggtgcgaacaggaggcatgctgatcagaaggtcatagacggcgcgcatcttcttgtccttgtcaacccagacgatcttcaagtttcactaagcgttagctcgaattccacaaggtttctcccaatcttagtggttcacatacatcctgcacaacattgtggtgcgaactgccggctcggccaacgcgaaggcgcacatggtcctggctaaggtattgctttgcaagtttccggaagtccttgttgaaggtagcggagaacatcaagtagcggtgatcatcatcctcgttgatatcttcttcgagttagcaacactgaaacgcataaaggtggggtcgagagagcgccatagcaaacacttacctcctccagacatgatcttcttgaactcgtcctcccagtcggattcgagcatctcatccgcctcgtcaatgacggtgtatctgaaacctcattagtatccaatgactatggatgcatatcaagtgagttgcaatcatacctaacgcggcgcagagaaagaacatgagtctgtgccatgaaatcgagaagacggccgggagtggcaatcagaatgtcgcatcctttctgaagctcctcacgctggacacgagtaggggcaccgccataaacgacacacggacgcagcatggagcgatagcacaaacgacgcgcttcatcaaatatctgagttgccaactctcgagtggggcagacgatcagaaccagcggctctgctcgaacagcatcctcccggaggctaaagttcgccgtcgtgttaggacgaggagcagccagctttctcgccttgcccatcaacttggaaataatcggaatgaggaaggcccccgtctttccagagcctatgaaaattccgttaggaccaacttttgtcaaacatcagactgcgcaacacataccagtttgagcgactgcaataagatcaagattggctagaacagccgggattgcataagactgcactgcagtaggttggtcatagccgcagagacgaatgttgtcgagcatgaccggatgcaagccaaagtttgcccactatagatcgttagactggaacattgtcgctaactcatctcgcagactgacctcggtaactgccttgatctcgttaggactttcaatgttgaccttgtatctgttcaacctggagaagaagtcatgttagatatcaagttgatgtcccatcggatatgtcacttactcgtcgagcttggcgccagctcgagtaatcagctcgccatggaaaagctggtcctccaattcagggacggctgggccgacatcgccgtagtcatcctgccattcgtaacgggcagcaactccagcccagtcacgatgatccttgctgttagcaagctcggcatactcgaaaggaactggatcagtccagcccttgtcacgagcgaccttttgagcagcctcagggttgggaccgacaccagaaagaacgccggcaggcgcctcttcagcggcggaaccatgaacagaagcaacatcagcgtccaagacggagccagctgagccaatggctgagccagcaactgagccggcagccgagtcggcaaccgacacagcatcaggctcgtcgtaagatgaatccattgtacacgaaagtgtctcagatgattgggttcaagagaggcgatgaggtagagaacagggtggtggggagaagaggaaaggaaagggaaatgggcgaccgtggggttttatgtccgtacaagagcaaacgcagaaacgcgtgtagggcttaaacaagtgaatatggcgcgcaattgctttgtcggtcgccgactcagcgagtactcgattggtgactgcgatattgcgggaagtccgaagtatagggaagtgaaccggatgtacctttcccgactaggaaggagcgatccaggtatacttctatcctcatacaattcactactggtatggatgtacatggtctaacctttgctactactgtgctaaccattgagcttagcactttgatatgtgcagagtagtttgctttaacattcaatatcaagccgtctttcatctacctttgtctttctatacattcactcaagatatgcacctatacttatgctatatcggttttaagtacctcattctcaattctgatgcgacaaatgagaccttataaaagaaagcggactccttcttagcagcatatatatacttgctaatcattcagcgtagtactttgatgtaactatacagagtggtttgcctcaatcaatatcacgccgtctttcacctcctttgtctttcagctgcatattctactgatatatgcacctattactatgtccggtttaagtagtgattctcaattctgaatgtgaccttatgaaagaaagcagactccctcttagcatgtgtatacttccccaggctatccattagggcacgatcgacaaacctcgggacgttagctcctcggcttcccagggtgagaaagtggaccctcccgtagcccgtttcgggtagaaggagatatacgcagtaagcctgggaacgggtatcctcttcatctccagtgattccacctaggtaacccctgcacaacactcaccatggcctccgaacgaatggaggtcgataccaatgctcgccgcaagcgtccgaaccgcttggaagctgccatcaccaatcccggcgctgtcaaaatcaacgtcacgggcgcattcattgtcgacgacgaaccccgatccaagagtcccgtcgaagcagagggcgtacactatgagaacaaggacatccgacttccgcatcatacaggcgtcgtgagccatgtggctgtcgatgtgagttgcccggaatttattttctctcgtgccccgcactgcgaccggttcccccgcaatctagcggcctgcagataatttgttcacgatgctagaagaaggcatggctaatacagcattgggacctggtagattggcggaacacttgcgaagcttgtttatttcactcgagagctagagaccgcggataacggtggccgactcaatttcctcaacttcgaaacccaccggatcgatctgtgcatcaacttcattagacatcttaaggaggaacacgagaagcgtaatggctcaacacgggagggactatgtgtggtagctactgggggtggtgcatacaaatactacgatcggctgaaagaagaattaaacgttaatattctacgggaggaggagatggaatgtctgatcattggtaagtcgtggaacctgcacaagcatagagcatactatctaacatctccaaaaggactggactttttcattaccgaaattcccaacgaagtcttcacttacagcgacaccgatgctgagccactgcaatatgccgaagctcggcccgatgtctatccttacctcctcgtcaatataggatcaggtgtgtcgatgataaaagtctccggtccgaggcaattcgagcgtgtcggtggaacacatctcggtggtggaacgttctggggcattatgtcgttgttgaccggctcgcggaccttcgacgacatgctagcaatggccgaccgcggagacaacagtgcagtggacatgcttgttggagatatctacggcatggactacaccaagattggtttgaagagcacagctattgccagtacttttgggaaggtgctgcggttgaaaaacgatgccgaacaagtggccgaggacggcgagggcttgattcgcgacgaccccagtgaagctagcgagtccaaccatggaatcaagcccaaaccggaagatatgagcaggagtctcctctatgccatcaggtatgtttcattatttccattcctatttccattctccgacggtctccgaactaacccggattagtaataatattggtcagatcgcatatctgcagtcagaaaaacactcagtgaaacatatttacttcggaggctcattcattcggggccaccggcaaacgatgaacaccctctcctacgccatccgcttctggtccaagggcgagaagcatgcgtatttcctgcgccacgagggctacctaggcgccgttggggccttcatccaacgacagccgcaaaactggggccgcagaaacagtgttgacgacgttgtcgcaccgcaggcggtccggaacatcgttcaaaatagccatgtccttcagcaacatggcaggtcgtccagtgatctataaaatttgtgccagactaaaccattgtgaccctaccctctctttgctttgagtcctgataccccttgcaagcaatctttgaactaccaatattgtgccgagttcttttgtgcacccaaagtggctgctttaattggccacctgtgaaaaaccaacgtggcgattccgggcatttgtgcatgttgtacacttagatctatctgaagctttctagcttcctgtttgaatccaaacatgttcggttatcatgttagagaaataaatctaatatttcattccttttccgggcgtgtgccttgacatccgcctacgcgagattatccaattccgtgagaagatcgagttcgataaaaacggtggctttgttacgccaccgcttggagttgctctatcgaatgccctggttttcctggctatcgcctacatcgtgcccattcgccagcgcaaggcaaagtggccggctgacttcagtaccgacggggatctttacccggagaggtggccgaggggatgtatcattgtgctttgggcttttgggttgccgtttatccagagttactggaactcggaacagatatctcctatcagtccttcctggcgggggtagctctctcttcgaaagttgccacagtggtaccttatctcctggttgatccaagatttcacgcgaaaagtcggcttctgtcttcaggttcggggcgttcccttagatgacgaagaagcgaagctgtgccagccgaatatcgacgtcaagcgaggcttatctgcacttggtaggtgtgatcgatcccttctggcactcctggaacaaagattggcttgcgcggtagatcttgaggttttgctatcagatttgatttggtttcataggcttgatcatctccttatctagctataacgctgaaatgtaggaaaagatattaaacaaagacgtctcttataaaaagacattttgaaagacatttaacacgacatattgaataatcattcttggtctacaatgtaaaacatcacgttagagagacaatgatctcgccttagttctctcagtttgcatctgataatggattgcttgtgtttgcaatgcatgtgatgttgtcgaggggacgcccatttttactttcctggtattgtttgttcctgtctgctgtcacctaagtctcaccttcacattcatttgtgtgtctcacattcactcttattactgtggcttctcgtgtatttccccgcgcgtctttctaccttttacttgactattctatccttatctattctatccttattcttacaaatacggaggacttctctcaacttaaaagcctcatggcgcaatctccggctgctcaggatgcatctcgtctgtcgcctttccaggttgaggtgaccgagtatgcttgtccggactctgttctcgaagcaccggaagaaacccacgaacgactacgaacctcaacgccatcctatctcactgagatggacgagtcgatgctggaagatccgtcggatactgccacggtatcacagtcagtctcgaccgagagtcatttcatcagttctacagccccgcgtgtcagctatgaagtcaccgcgtctggcgaactcatgataacggaaggaatccaaacttccaacccaacgacgcctgcgcgtgggccccggcctggtcctccacctgcacttgtgtcctttgataggattgcccagggattaccgccaaagccggcatcctcatctaccacagcaacaactcaccctccatccctgtcagtggagcgcctcatcggcccaaagcagccgatccccgcgcgaatcctcgatcttttcgagcaatggcatgaggctgaacccaacaccgagcatcccgctgctctgactggccgtgctccatcaacatggaagaacttcagggctttcagtgatgatgccgacgagtgcgagctatcggtcttccagatattgctcaaatgtcaaaaccggcgcatcctctcgtatcgcattatgatacttcattcccagaatggaccagaggagctcgtcgtcttcggccaaccccggccgaagttcaagggaccctggaataagggtgtcaaggggctgtacctactggactggtcggaaatcgagaagaaaggagaggttcgggcgtgcggtatcaaactgtggagaaccgatgacaagaatattgcgttcagtgcctacatgtttgacgatggacgaaagtgcacccgcttcctcgatcacaatgctggaaataagcaagcctcatcttctactcccaagaaacagtctgacggaaatgagcatgttgaggacacccagtccatctcatccgagccaccgttttccccctcgagatctggacaccaaattcccagcagtctttccagagctgagaatgaaactgaagacagaaccccacgtgcctcacggtgggatcacccttcccccatgtgggctaagtccatctcacccgtccccactcccaataattacgatggattccgttctcttgcgagcccttggaagcctcaaaagaggcgccgtagctcatggagctccaatgaccaagactccgatcctattcgcttcaagttgatgtcggacgtgtctgatcaagtccgcgttttcaagacacttgacgcgaaggtgttgtttgaaaaggcctgggatttctacaagggcgtggataaccgcactggactgttgtgtaccattgctggtctcgacggagtccgatacgtgggagatgggtgtgtggatgaatttgatatccttcaggaggatattatgaagtcttcttgtggcgatgaagatcgcgtggttgaggtgaagcccgcaatgggcttctagatggccaaaatgggcttgtgggattgtgtgtggcggtaactttggccaatctctgcttctcgtctttcttgatgttgttggcctggtgtggtggttggcctagtggccattgtggtgatttcggccagtttattctgcaccggaaagcttcatccaaatcttttgtatctcgcctgcgcgtgtatgtatctgtacctaattcaaataaatgcaagaaaaaaaagaaatattacatttgtcagattatcccatgacccatgtaatcaactaacaacatccctctctaaattatgctgttattctttggcatagtccccattgatgtcaattatatatatttgaagtgaacaagttgtatataagctaggatgagctatgaatatttgacctcgctataccgggatacacaagctaaatacagtctacacctttaaaattgaaagcgtccgaggccttctatcccataagaaacgaatcccagcgactcatccaaccagaagaaagggctgacatggtcacgtgtagatatagctcactgctgaatcagcatctagatgcacgcgggttgcgccctcgttgacaacagccgtcacatctaccttacacatcgggcttaatttcttctcacaccatgccgcgacgctagttctacctttgcccgatgacgtctcctccttcgctagactccttcgctcccccgatccccgtcgaaacccattcaaaccgcaccccggagtctcctgagctcgaacggtccctgcccgaccccaatcgattagcgcccgaggatgcgtacttcgcaaacccactcttgcgcgcccgatcggcgcccagcaactaccaggaaaacttacgatcgttgaacggcgatagcagtgtgcatattgggtctgctgcggcgttgcgcaagaagttgggcggtgctggacggcgtcggaagcggaagggtgcttggaagaagttgttatgggttaagcaatcatgtatgtatgcgtgtgggtcgagaccttgtacagggcttgagcttggtgttgcgctgttgctgacggccgattcatagatcccgataactataccgacacggaaacgtttctagatcaccttcagcgcaatcctcgagtgcggccgtatgacttctggcctctggtggctgattcgactgtgattgtgcagcatgtgtgctcggtggttatcttcgtttgctgcttcgttggcattgtccaagatcgagtgagccctgtctcgattgtctgctggggtagtgttggtacggctatgggctggattctgtgggataattggatctggaacgagcatcaggaatccgtgcaaagtgcagatggaattactggaggtgatgatggatccagttcgacttcatttgctagccccatcgatacaccctccaatgacacacaatccgatgatccgaagacgaatgccattcatggcctggggctgtctatttccgggaatgaatcgaaagagcaactagcccgtcgcagtgcggatttcagcgaaagcatcgacgctgtggctcatttgacagcgcaaagtgctgtgccgcctggcccgggcagctccatcattggcactacggacccgtcgatatcgcaatatacccaccgcgtttcgatgctatcaccgcgcaaccgccagcgcttgactacagtcaagtcggccttccttatttacttcgccctcttgggcctcagtcccatcttgaaatctcttaccaagtccaccgccagcgactctatctgggcgatgagctgctggcttttaattatgaatatattctctttcgactacgggagcggggaaggcgctggcgccaccacgaaattccctgcttctttgtccacgaacgcagccgtgatggcatcgactgtgctcgcgtcccggctgccgtctacgacacacgtgttcagtctcatgctgttctcgatggaagtattcgggctattccccatcttccggcgccaactgcgacagaaatcctggactggccatgtgctcctgacactgacccttgtgatcgttgccggtggtgctgttggtgtcacgctgagtggcggatgggcagcagccataattggatcagtcctgggaagcatcttgactgcatttgtcatgggcgggtgcagttggtggcttatcagcttgcaaaagtacaagaacgtcgtgatcggtccctgggaccctgctcggccgatcattcggcgtcactggaactaagcccatatgtgatgtcttttagcgccattgtaatatagtttgtcggcgtttggttcgatcttcttgttgcttataccccttgatcagtctatccatttgaaacatcgtggaggtttcaactgccttctttccgtgtatcagttttgccacggctcaagccggtgctcgtagagtcaggtcctgacgtgattcatattcttcaaggaatacttccagaaatcctgggcatcaaatccggttttcatttcaatgatcattaggttcaaataaggggggaatgcgggttcaagaggaatgcaagacacatctggcatactaaccttgtacattgtccaccgttgaacttgccgccatatacctgcgaaggaaaagcgtttgatatttgaaacgtttcaatcagggtcatggacccttagtctatttttgtctattctcattgggggcagtatctcgttcgaacagcctcaagggacttggcattccgcagccactcatttagcgcctagaacccttttttcccccagggggctttctgactccattgattgaccagacagctggccactgatacgacattcccaaacggaatggtccacatgccccgcatgcacagagacacatgttcgacggcctgagacgattatcctggcatgtctttgtgcagaacaggaatataaacctgaccttcttctgttcctgatgtctgtctctattcttccttctgcttactttgttcgcggcttgaagctgcttctcgactctcaacgacaggctggatatctgtttatacattctttcctgatccctggatctaccttacgacctgataaacatatcgtaacgaccgtcatctaattgattccatcatgttaaaacgactcgcacttggcctgctggccgctcagtccgtggctgccacgcgctttgccatgtacatcgacgagttagtacaaacttgcggaattgatctacataccctgaacccacagctaatacttgcccaagataccatgtaaccgctctgccgggccagaaccagaccgagggtatcgactatgcaattatgagcttcgctgcctcgaagctattcaactcagactcgcccgcagcatacaagccatttgagtcgcccgagaccatgcgcaagcgcttcagctccggtaccaagctaatggtcgctattggcggctggggcgacaccgctggcttctctgagggagcaaaggatgcggcttcgcgcacgcgatatgccaagaatgtcgcttccatgctcgacgcaaatggattcgacggtgtcggtaagatatcccaacaatgcgttctggatataaaagaagaagcaaggtactaacctatatgaacagacattgactgggaataccctggcggtaacggccaagactacaaagacgtgcccaactcgaagaaagtggacgaaatcgaaacctaccctcttttcctcgaagctgtccgcaaagcaatcggcaacaagaccctctctattgcagtgcccggccgtaagcaggacttcattgccttcactaaggagcagggtcctaagatcttcaagtctgtcgatatggtcaatgtcatgtcctatgatctgattaaccgccgtgataacgttaccggccacgctagcggtgtccagggatccttggataccattaacgagtatatcgccatcggggctgatcctgcaaagctcaaccttggcttcgcgtactacgcgaagtggtttaccaccgaccccaattccgattgtgatgagaaccctctcggctgccatcttgccaagctcgaaaacgacgatggaacagacaatggcaagtctggtgctatgactttcgaagctagtactgctgccgctgcgcctaaggatctgaagcaaagcaccgatggattgtgcggatttggagcgaaggccaagtgcccatcgggacagtgctgcagttcttccggctactggtatgcataacatcatttaattctgatcagtatctagactaaccccttacagcggtactggcgatgatttctgtcaggctgggtgtctctcagactacggtacctgcaagggcatctccatcaccgactcatggcgcaaagcccagaaggacggcaagaccgacgagaagggtggtggtcagtactactttgacagcgataataatctcttctggacctgggatacacccgagttgattgcccgcaagttcaaggaaattgtcgcggagaagaagcttggtggtgtcatggcttggagcttgggcgaggatacctacaagttcgagcacttggaggctatgcagaagggtctcaagtctcactctcccaaagtcgcggagcccccccaatgaccgacagagactgtgcctagtagctagatgcagttatcattgatggtgagtcggagttggagctcagcttgtgaaatataccaaactgcttttactgtctattcgattcccctttttgcttcatttcatctctacatctcttctattgcccatgtctacactatcaatgtcctcatagtcatcttaatatctttcttcggttgaatgccggggtaaaattcaaatcaccatcatattccctattcgctattcattcggtagtccaccgacccatccatgactcaatgtacctctgcaccaagccaccagcaacgggatcctcaacacaagcaagatatgggcagtcctgaaccgtccgctcggtttcgaaagtaagaccagcgtcttcaataccgcttggtcctgtctctgacaggccatgacttgcatacttagccgtccagaaatcgatgagcttcatactcggatttttctccgggtcctggtcactactcgccaatctcctcagccactcctgcggagatacaacctcaaactccggcaagatagatccatccctcagagcaggaagcaaatcctccttccagctaaatgtccgcggattaaccaaatggtacaccatattggcttcggaagattcagcgacattcatggcgatatccgaaatagcccgagcacactgatcaacaggcagccagctcagccgctcattcagctctggcaatgcaccagtcgtcaatgcacttcggaacataagcgaaacagcttccgtttcattccattgcgcgctaaacgtatcgccaccaagctgaccgattctcagaacgcgagcttgcatgcccgtctgccgcatagcgttacgggtgatgtgttctgtaaccagctttgacctgccatatcccattttctgtgcgtgctccaagttctccagtatcgtctccggaatcgatgccggtttgggtgtgttgcttgcagcgcttacactggagcagaagaagaagcgcgcaggggacggtaggagggagcgtaggcagagattgatgaggttgtgtgttccgcgtatatgctgttgctcgaaggaccgtacgcctaggttgaagttcaccgcccaggcactgtggatgacgcatgtcaaggatgacagtaagtgttgcaaatcgtggtctttcagaccgaggttcgactgtgacaagtcaccggggatggcgtgaagctttgcggcttcggcatcagtgagagtgatgttgcggtcagctagtgatttgtagagacgagctcctgccgctgcttgtcctggtgcgcgcacgattgcccagacttcggagactgttggtcgccttagtaattccgagacgatgaaggctcccaggttgccggttgcgccggtgaccaccacaacctctgtttctgggctttgggtgatggttgggaagtgttgagtgaagtgggagtacttttcgatcatttcgcgcatggaatcaagctcatcttccttctcggattcttcaccagttcgcagctgatagaggtgctttgcaagcgccttgacagtgcctttttcgaacacaatgttctgggaaagctgatctcctcgctcggcgatatcaatatcgcgcatgatgaacctccagatttgtgtggtctgcaagctgtccactcctgccgagaagatgtcggcttcggcatcgggtattggtacgcccaagtcttccctgaatcttgaaagcagccaatcctccagttctgagacattgagagagagggaacctcctttctggccactcccctcgaacttggcatatacctgcttgatatcctcctcaaattgctgataaacctgacctcgtatacaggttcctttatcagttctggggtatacaacatcagcacccttaattatgaccaactcctttgggatacgggagaatgtctcggcgcgagaatttgctacttcaaccgctggccagatagcttccaaaaattcctcgtcgctcaagtgaggcaccttgccaggagcacggaaaattaatgcaccaggcaccgtccgctggaagccgaacacaacgcaatcactcacgataggctcttctctaacgcgaccctcgataggaataggaagcaccttttcaccgttgaccagcgtgattcgatcatccagccgactcaaatacttgtaataattgctcttcgctggatccgggtgtctggtgaacaaatcggctgttctgaaagagttttctgggttcttcgcgctatacggtggctttgaatttgacgggcccttgctcggcaggccgtccaatgcgacacattcaaaaaccccaggcgagatctcatccattagagtgaggtcggcaatgggacgatgcagtcgtgtatactgccactctttatcttccggagctcggaaagaagtcatgatttgtcctgtctccgttgctccatagttggcaactagattcacgccctgtgccacaagacggtcaccaaggtcgtctgggcagctggagccaccatatagcacaagctgcggtctggctagtgcttggataccttcttgcttctctgccagtagtttgatgacatatggcacggcactgatttgctgtggatgggccatctggagcgcatcgaaaagattttggtatgtgactggaagagaatggtttcccaggtacgctgtcgctcttgtaaagaatgcccgtccaaactccatcagagcatgggagtggaagagtgggctgatagtgaagaggcgtaggccgaagctcttgcggaaattggctagagtttgaaggttggtaaggaaaatcggcttcgggaaaccggtactcccagaggaatgtaggatccaagcgatcttcttgccttctcgtgatggatccgcaccctggcgttcaaatagaggcgtgctaacaggtcgattgaaccagtcctctctttgtagtagagagaagctaccgcaaccaggacgctcggtacaaatttcagttacaacttgctgaaattgcctcgtgttgataatctggttgcaatttgccatctccattagccgggcataagccggggctgtaagacgtgtagacaagaaaagcacagcatagccaagacgattcagcgcgaagaaagtcaccacgacctcgaagctagatccagctagcatagcaataacaggcgcctgctcgagcctcgggtcctaggggataattagtctagtttgacacaagaaactggctttcttcttaccgcgggtaggagaccttgcttcatgtaaaagcgaacagcgatatcagtataccgattgatgtcaccggctgtatgttcttcgaaatcagccgcttcacgaaccggatagcatatcaaaggcctttgtgcttcatcttgctgagcggcatgggattttaatagaccatcgatggtggcgaactgttcaaacgccggccactgggaatgaagcgtcccgtttaacaggcgagtcgcgatatcttttgtctggagtggctccacgcccccttgggtagtcgtgatggttactgtagtcatgattgttgtgtaaaataccattaacagtccattgactcgagatcgctttatacctggcggaaaagcctcacgttggggtaatcccacgcatcgcgggtgcttttccgggtttccgcgtggatgccccggaaaacacttaaccccagatttggatccccgcactatttccaggtttcaatcgaggattctcatgtaaatgttggtgaaattggccatattgtaatgataggtgcagataacttcgccgtatgagatgagacgaggtgttgattacgttgatggctcggatatccgagatggcaatgcatatcaggccaaaataagacatcaaattcaggcatcgaattcaggcatgaatattgtgatgacataatcacaggctactaactagcctgaggccacacgccaagagttcacatattacctccctacaacttgcaagcgagaagattcacagatatattaaacaaggaaaccaaaaaaacgaacgcataagagataaaaagtagtcaacatgttgtaaggatctttttttggctggcgcaaacaggatagttcttccaaagctgcctgaagccctatattgactactcaaggctaggaaaagacagagacatcacatttgccatcactccacttcacagcctgttccttggtaggatacacatggacaaatgccaagtacggtgatttatccgagcctttctgatcactgcacgcctgctggaagcgggcggtcaaatcctcctcctttgatgctggagttgtcaaaaagcaagcgcgttcgcaaagttttcctttcatcttgtcgcaaacagcctttcgcttttcggcgaccgtgtctggtaagtcaacaccagtacaacgggcttcaacataacgagtcgaatcaagagtgctaggatcgcaaaccatccgcacaccacctgcctccatcacgacgctccatttgcctcccagacaattatcatcgcaacctttgttggtgcggcagtcttgaccaggggtgtattttgcagtagctgacgcagcaaagagcgtggtgatggcgagaaacagcttcatgatgccttttggttgcacgaaggtagggcctgtaatttagttagtgaaatgcatggacgcagtcaacgaggcttcagaagcttactatggggcggaggatggataaattatgatgcaagtcaggaaatggggtagaggattcgttgtatgggggaaaaagaagctatgagaggagggagcgagacctccttatttatgataagaaagagcgttccatgttgaagaaagcgagtgagttgctttttcctatacctagtttgttcaatgcctcgcatttctcatccagctgaaatgtgggactaatcctagttaggtacctgaataatgcagggcaaaagcttgagtatcatgccggtaactgtaagggagaggtccggccaaatcgtgaatactctacaataggaagacaggtcccacgacgtcggctacctgcctcctatgtattgtcgatcattgtcgatcgtatatctcaatctacagaacatggaattctggcaggaatacttgcagatcattcaaccttgcatgatcagcgggaaactactcaaaaaccatcaatagtcgaaccttaagagcataattggaaagctaatatgtataggctacaggagattcgagtgaattagtccggcgacaaccatctggtctctctccttgaagacaagctccagtcttctgttacaaaacatctacctcttcaagtcaatcaacatgaaatccacttttcttgtttctcttatacctttcatacagggtgttctgggctctgtagaagtcctaggtggctcacctgttacgattgatgaccttccctacctggccagcatttcgaaatcaggcgtctatacctgtgctagtgttattatcagcaacgaccgtgtcgttacttccgtgcagtgcgtttatggcctagagtcacaacccacgagcctttccgtgagaacaggctcaagcaaaacgtcttctgggggatctgcatggacagtatcaaagatgatcggaatgctcggtttaacactgacaccaatgattttgactttgccgtgctcgaactattttctcctctcgtacccggcccgactgtcaagccgattgaatttattcagtctggtcaggagccagaggatgggactgaatgcgtagcttccggctggggtgactcgggagaacaattacaatcggttacactccctatcgtgaaccgagaagaatgtaatcagacttatgccggccaaatcaccgaccttatgatctgtgctggctcagaagctgggaaaggtacctgtccaggggaccgtggtggcccggttacttaggtggtaaatttgctggaatcatctctcaaactaatagatgccaactacttggtcgtctagacgttttcaccgatgttgccaactcttctattcaatcttggatacaggatcagtaatgacaactcgcagcaggtatttgcccactgaggttctgcgccaaaagacagaacatggtagatgaatactgtagagtttcaaggaccgtcacaatttcaatgttgaatttagcgaacagcgtttataaaagcccaaactaggagcaccaaagtgagcattgacttgattgagcatctatttattgaagtcagggaatgtaactcccgcaagttctcaatataattgcttcgcttcgctccgcaataataaatattgtacgaaaagtatcaatgtataaaaaatgtggcaaaacagaacacttgcttaccaatcgagctcctttgttatgtagttacatggttcaagtctattagtaaaagattcactgtacacatctaaattctaatatacatcttgtcactttaaacacggcacaagcgaccattctgatcgggaaggccatcaaggctcttgacaacccaatcctcactgccaacagcagtaggcgcatagaacaagccagtcgggtcataccgctgcttaatcttatacaagcggccgtagttggtaccatagaaagcctgctcgaacttcggttcgttgatatccgactcggacatgtatgcgccagagtcagggcaaacagcgcgccacttgccaacggcatcggtgaggccctccatcttgactttgatatcggcatcggaggcggtatctgtccaggacgtcgacgtgatggcgtgcatcaccgcctggcggaaggctgggtttgcagaattgggggtgaagccctcttgcagctcggctttcaggttgaatgcgagcaatgcgaagccgtcagtaagagtggagcgcagggcagcgaaggtagcgttgaatgaggtgggggtggcccaattggcccgtgggaagaggcgagagccggtcatcatagttggtgaggcgactgattcgagagggaatccggccatccaggcgtcgtagtagttgtcgtagtaggtcgtgtttggctggattgcgatgcctagctcttggaggtcatcgtaccatggcttgactagggtgttgaactggtccacggtgtggttgacggcgaagaaggggttcattatgaaggtgaaggcgtcagtgcctgtgggcagcacccaaaagtaggcgtaggtgccggcgtcggcgtgggtggggaagcgctccaagtatgatcggacgccagcaaagaaggtgtccacagagatattctcgccagttgagaagctaaatgtcgaaagagtcacaccgaccttaggatagacacgagagataatagaagtgacgactccataggttcctgatgggaatatgttagatgaaattcgagaagagaaagcgagagaaagtacacataccgccgccaccgccacgcagagcccagaatagatcgggattactttctttggtcactgtgacgaagcgtccgttggccagcacgacctcaagggccaagacttgatcagcagccaggccgtacacgctagacatgggcgaatgaccgccgccgagaacgtagccaccggcaacaccgacagtctaataaagtcagttatctcaccaaacgatgatcctttcggactgaccaactcaccttgccttcgccaccaacagcggtgaatccgagttccttactcttctcatagacttcaaatgcctgcacacctgaccccagcttgacaacgggaccctggtagccggagccgctatagttttcaatgtagtcaatgtccttaaggtggtgagtccagatacccaaagcaccagcaccggttgattttccattgaagtcatgcccggtgttcttaaccactagacggatgtccgcgttgcgtgcaaagttgacagcaagctggatttgagctacagtgctcacattcacagcatagctgctgtagccaccgacagtgcaagatgcagaggcattggtagtgggaaggcaggttcttccctcaaacagaggccacattgccgaggctgggtcagcagcactaatcgtagaatcagtataggtccatgtttgatagttacaggagtagggtgtgactaactgaagattagagtcgttccaatccgaggtaactctctcgcattcggcgctgtcatattcgggccatgaagaatagcaagacgccgctagggggaccgtcttgatcagcgcgccaccgaggaggttgtccaaggtcgaccatgcagactgcgacggccaatagcggtcaccggggaaaaccttgcattgccctgaagacagcgtggtcttatcagtgccattgctatcgccaaatttaaccagggctgactgctgtcggttgagcttcgcaatttcgcgatctgtcaattgaaccttctcactgtcaaacagcggtgcaccagccgaagcctgaccagcgcgggcatgtccgggggtgactagtaggagagcaccgagcaaaacgctcgttatagtcgaacaaggagacatggtgagcgtgtgaatgggaagaagctacaccggggatcggcatgattgggaaaaagtggccaatggagaccttttaaatcaattctccggcgctcgccagcataaaatgtgcatggtacgatatactagttagcgcaacgtggatagtactttcgtcgctatgaggttggcatccaagaggaaaaggcgcttgtttacttcgcccccacagcaatttagaatgtctcgctcaagccctctcccactccacctctcgtgtatctcttccaacgagaatcgaaatttgcatgaagctagagctagagatggtcttttctccgggcctccccgttcggcaaaataaataaagccacactctacctgtgacgcgcggaacgagtccttgccgtgttgttgagaatacaagtccaaccgagactgtcgccattagcttatttccattcagtgcggagtactccggatagcgtaagcaaccgtgcctattcccactctactccgtaccggtcgggatgatcagggtttcgatcttgtctggttctcttgttctctcgttctctccacggccgagagagtgttgcaaggaacaacgcaagccaagaactactccgtacaagatacgtgaacaaccgctactccgtgtacgaacggagtttttcttttcggcttgaccctacggagtaaacatggtctggccgggctccattctccatcccccgtccgcgatggtccactatgctccacctaagtacggagtactagatccgatctgctttctgggcaatgagaaccttgagtgcaagggactagtaggatgttgcatttcatctaattttgccaagggtcagaactaaaaaaactaatgaaaacttgttaaatgacgcagaaccgggaatttcgtcgtgggggccaaatatatacggagtgttgtgtccgagatatcgagctagaccgatgcactcatacacactatcgctgacgtttgatccttgatgatccaccattgagcacattcctgtactcactgaaataggcacttgtccaaattcaataacaccggcataagtgtataattgggggagttctcactcccgcccttttcgtcctccttatacaacataaggatgagctgcggatgtaacgctgcaagaaacgattaagctttgactagttagcttgcgagaggtgactgctctcggtatgcaagtagtatcctgtacctgcactagatgaggaatcgcatattacttcctgttacggacaattcttcagagcctagggtttcaatcccacttgaacacaatgaaacaatgcactactcaagcagcgaggacctgctcttctggtttctgtctaggagtcaaactaagaaggactcctccaatctaaaggacgcgtgcatccctgcacgccatgcattattggctctccccttgattaccggcatcataggtcaacggaaatagagccaattgggacacgaaggccgcgacttaaattagatcaatcaataaagtgtttatctaggtagaaacccttggaatggcccccgaacttcaaaagctaaagccaaataagtggatcatcgttgccgatcctaagtcgctgtgttggccgcagtaccagccttgcatcttaagatcgaaggtgcaggctgttcgagaactattacgttcttccgggtgtttatacaatggttgacgaccatcaacataaaacagccctagggattgtcgtcgcattcacggccctcggtggcattgctgttctacttcggctctggagccgatggctatcacgatcggcactcaccagtggtatggaacgaacgctcagatcggcactggaattgaaccattagaagtggttgctaacgagactcccgacagatgactgcttcattgttgtgggatatgtaagatcgtcaaattccagatccttgaagagtgtatgctaaatgggtattctctagatcatctccatctgccagtctattacctcgtggtactgtaagtgatgtgattcatctaagaaacagaagtgagcaactgctaattaaatcagacatcaaaaccaattatgtcggctttcatatttgggatatccccaaagacttcaatcccagacctgggatgaatgtaagtctactacccagcgcccgtaatagccagaggctcacggacaaaacagtggaacttcgcaaatcagattctctacaatccagccttgaccgtggtaaagctgtcaatattgttgttcctgcgccgactcgattcgcgctcacgggtggtcaaatacctcacctggagctcgttcgccgtggtaatcactctttttatgaccgttctcctcgtcgacatttttcaatgcaatccagtagcatacgtctacgacacgacgatcccgggcggaaaatgcatcaaccaaggcgcattctacgtctcaaccgcagcgctaaacctcttcaccgatataatggtcctctcaatcccggtcataatcactgcgcgccttcaaatgcccctccgacgcaagattgccgtgtgtatcatcctatgcctaggcggagtgtaagtaaacccccgaaatccaaccccaaccacccatcatacaccgcacacagcaatctgacacatccaaccaacagagcaaccgccgtcggagtctggcgaatcgtaatgctcgcccaagcatttctctccaacaccccaaacccagacccaacttacgcaatcggcttctgcagctccgcagtcgaaataaacgtcgcagtggtatcagcctgcggtccgtccctgaaagccatcagcagcaggatattccccaaactgctcggcagctcgcgagggaaatccacctactacggcgccggcaccggctccggcaccggcgtgggctcacgcagactccgctcgaatgcgttcaagtctacctcacacgcccagcaatcagtgtactccacccgcggcgcagattacgagatggccgatccgctgggcgggccgcgtgttgatgttgttggggattttgaaatgcgcaagtataagcgtgggggtagtgatagtggtctgagtagtgaggatggtaagggcattatgaagacgactgatatctcggtcggatatagtatggagccccgggtggaggatggtcggtcgcacgatggtaggccggccagtgtagatagtatagtttaatcaccttatatacaacatagatacgatttacgaattcaaatggccaatagcctacttgaagaagaaggatatcaaaatggaccgaggatctactccaatttcggatatgaggggttactctgcgtacataaggtatggggtttcccctcttataacatcacttacctggtcaattcagtaaatttgacttgttttcatattcaactcattcttgattcatcgatatggcgactcagtaccagctaccattcaaggtatggcttttatccctccgcggggttcggcgagatgtccgaagtgttgagctaacacgactttttccagctcgcggatcctagtctgctgaaattcgactccattgtcggcgacaaatgggtcggtgcaaagagcggaaagcggtttgaagtactcggtaggtgaaagtgcattatcctccaagagctcacaactaacatctcccacgcagaccccggcaccgacaaagcgtgggccagctgccccgccaacgcagcagaagatgtatccgccgccgtggaaaattcccacgcagccttcgagcaattccgcaaagtcaacccacgccaacgcgccaagtggctcctaggatggtacaacctaactgtcgcggcccgcgacgacctcgcccagatcgtaacctacgaaaccggaaagccgctggcagaagcatacggcgagattgactactccctgggcttcctatggtggttcgccggagaagcagagcgcatccagggcagcgtatcaacagccgccgcaccaaaccgtcgtctgttcaccatcaagcagccgattggcgtagcagccgctctcgtcccgtggaacttccccgttgccatggttctacggaaagtcggtgccgcactagcggctggctgcacgatggtcgtcaaacccagtcccgagacgccgatttcggcgctcgtgctggcagagctggcgcatcgcgctggaatccctgctggtgtgctgaatgtgctcactacggacttggagaataccccggctctgagtgaggcgttatgtaaacacccgcttgtcaagaaggtgacgttcacaggctcgacacggataggtaagttggtggctgcgcactgtgcgcatggtcttaagaaagtgactctcgagctcggcgggaattgtccattccttgttttcgacgatgcgaatctcgatcaggccgttgagcagctgatgtcgctgaaatggcgccatgccggccaggcttgtatcactgccaatcgaatctatgtgcaggctggggtttatgatcgcttcgccgctcttctgaaggagcgcactgctgcgatagttgttggtcatggtgccgcggctaacaccacgatgggaccgttgacgacacctcgcagtcttgataaggcctctgcgcaagttgaagatgctcgtcgcctcggtgctgatgttattttgggtggtaattctctgacctcgaagccgggttatttcttcgagcctacaatcttgtcaggaatgaccgcggacatggccatctcgcatgaggaatcgtttgcgccgattgctgcgctgtatcgattcgatactgaggatcaggctgtcaagctggctaatgataccagtatgggtctggccagttatgctttcaccaagaatatcgatcgcatgtggcgactcttggaaaacttggaggcgggaatgatcggaatgaatacaggtgggcttcctatgatcaagtccaataattctaatcaatctaacgaattcgcacaggcaactcatcggctgccgagtcgcctttcggtggtcttaaggagtctggttatggcaaagagagtggaaaagacgtggctgtcaatgagtacttggtcaccaagacaggtaccttgacaattgagggacaatattgagtacacaacatagtacatatgcattctttatagatcatctcgatcatcttgaactgaaatgaaattcatgtattttcttggttgtgattggtcagctgaatccacttcaagcactgattggctacaatccggggagatcttttcaatatcagattttcttcactacaccaactattcttctcatcatggaccaccttagtccgctacgacgcctgattcagtctcacccgcttattgacagtcattcccacaacctactgaaccgcgaatcagccgccgactatgaaaattacccgttggaagccatcgcctcctcagcagacggtcgggccttagaaaatgcacgcaccgccctcccctcgctgagggccataacccagctctccgagctgtacgacctcccatgcacaaactggaaagacatacaagctgcccatgatctctacgtcagcgaagactacgaaaacttaatccggaaatctctatcaggcacacacgcactgctactcgatgatgttctcagctacgacgaagacatcgcatcatctagctggcacgataaattcaccatctccgggacaaaacggatcgtacatatcgaagccatggctgaggccacaatcctgcaggtatcgaactcgcgcaagaacggcgaatcagtttggaacagtttccgacagcgattccaggacgctctcggcgaggccctggacgatgccaacatcgttgggtttaaatcggaaatctgctgtcggaccggattggacgtggatgcgtattcctctgatgataccactctgggcgggtcattgattcgcatcctcgattccggcacaacaaggtctggcttcgcagtcgatgataaacatatatgtgactggatagtccagcagacgctaaaagcgatctgctttaaaaagagagccggtgttgtgaaacccttgctgttccataccggcttgggagataatcggattaatcttttgcgagctaaccctgcatgtctgcagcctttgatcgcgcagtacgctgacgcggacatcgtgttgttacatgctggatatccttacacacgcgaggcgggttatctggcatcagcttatcccaatgtctatcttgaccttgggaaggtctttcccttggttagccgagaggcgcaggtgaaagtcctgagagagagtctggaacttgcgcccaccaaccgtctgctctggggtaccagtggccggtttcacccggagacgttctggttggctaatcgacagttccgccaggctcttgagacggttagttcctggactgcctcctattaattacctttccctatgctaattttcttctgttttgcaggttctcgtggagtatgttgaatctggcgacttcactgcgtcccatgccatgaagatagcagcagatgttctgttctataactccaatcggctttacggcctcgacttgactccatcatacacacctggagagtaaactgctgactatgcgaggatgtagagcccgaaggtatgtccatgtctttcatttctattccccagatgcatcctgacaattatctcgtcagttgatgcttctactctcacgctctcctaatgtacttgatattgcaaccccgctgtcaaaattgattatcaatctttgagattctcagaatctctcgaaggcgatacggacctggaagcactgctagcgtcggagcataggaataactacgtttcgtgaggtaactgaacctcgcatccaccccgaataaggctatactgctccgtattaagacgaaattttgaaccagttcatacgatgacgtcattgtagttgtaatgtttaccttagcaatttgcaacacacccaacgtcaaagtgtgtaaagataaccgtctcgtcaacaacccaagagatagcggcggctgccgctttcggccgttgagatttatattacgcgaagacattaccgtgatgctggtgatcgtgctgaagagttgttagccatttaaaaaagcctgaaccagatcgacatagtggatcatttaggacacgcccgagctcacattgcctttgtacgtttgtcccaattacacatgataagttgcgaagatggtcaaatttccttgcatggaaaaaattctacaatctaccagaagggggcgttttcacgtgttgcatcccatcccatattacgcggtttctatacattagacgttctcggaaacgcaaatggaagcttgggaagttataggaatcgtttcatctgacattaaaatccgaagctatgcgttatgaggcacttgctggcagtatgagaagatattcataaccctctgggagcttgcccaatggccaatcccacttcttctcgaccaccgccagcgccttcaatggctcttcgtggtccacgaagaacttggtattcacgcccgaaacaatcccagtcgtatccttgccgtcgaatatgattccacaccgctcagcatctcgaatgtaaggcaccggggaggtcgacatggtttcattggcgttcttagcaatgaaatcaaggtctaccttttcgatagttcctactcaggataagtatcacgcctccagagctttttgtgtgggacttactatcaaaagctttgacggcagctagacaggcagctggatgtgagctcatcacgccgtatatagtatcatggtctgtcctgagtattcgcaaaagactagtcgcaaatcctttgccacggtggtgccgatcgaccactaattgagtgatccagcaaacagtcccacccttgcaagtccagcggcagccgaatgcatgtctgacaagttttccttcgataatcaccctgctatatgtagaaactcccaccactttcgtcggagcttgtgggtaggtattgttcgcgtagtcttcgcacatttaacttaaccggctttcctactaaaagttagatgttttggaaagaaagcttttgacttactcaccgggattacttgaaaactcgccccaatgtgccatagttttccttgaagagctgagtggccttgatcagtatgtcgtccgtaacgttctccgcagggatcgtctcgtagatttgtgacgccatgctgaagtgtctttgaacattagtactttcaatgagttcaaagtgagttgactccgcgggaataggatgagttatgacgatggtttatgcaagtccccgttggcgtacatgtgagggggagggctcgtttatgtaccacaaaaatatgaatctttccatgcaaaagttaccagtatgtatattgaattctcgtttctcatattagaacggaatgtgatcgtgatttttttttccatgccgtccttccctcgtcccaaatcgtatacatatcgcaaggtcagcagaacaatccagcgccacctgaagtaacagacatctatgtgcgaataaatttcaatcatcggatcaaatccaaatataagacacgcgtataccatcgcgagggtatatcgttgcacgtcgtccgattttgagcgtcgtggaagaagcgaaagcaaaaataaaaggtataccaaccccagccgtcgcttcccgtgtatccagcgttggtctggtacaatgcagtgttaatcaataaatagctcaaacaatagcagttgttggaatgtgtgtgtgtgtgggatatggtggggggagagagagagacagaggaggagaaatcaaaatgtccattgtctgatatgatagtattgataatgttataacaacacaatcaacaccgatcacttcttcaggtcaacgacagattgatatcatagggctatgatgagtacaaaaaagaaagaaaagaaaaaaaagccaaaaacagtggtacatttcgtgtgcggtttggtagggtgtgagagtgagagaatgtgagagtgagaggatgagaggaagaagaaagaagtagggaggtagatgtatgctcgagacaagagatcctaagagccaaggccatcggacacatcatcgcaagcaaaaacaaaggggtaaaggatggaaaccagcaaacaaaacgaggatttcaaaaaaaaagctcgcacgccgaaccaaaatggacaaaacaatgctagttcaacatgccatcttccgttctgttaccatttcatccctttcccactcatctagtagtcgtgctacttctctgaaagataccggttttgtaaggaatagatccacaccagaagccatagcatccgactcatcgcgagagctgctgagtccggtcaaggcaatgatgatagccggcttgcggccatctatatccctctcgagagagcgaatagcacgagtagcctcgaacccattcatgacaggcatcgacatgtccatgaagatgatatcataaccactctgcatgcgctccactgcctcaacggccaccttgccattatcggctgggtccagctcggtcagctggcgctttttgaggaacgtcatcatcaggttgaggtttatgcgattatcgtcaaccacaagcacccgggctagtcgtcgagggcggatttcaccctctatcagtggtgctggtagaggggattctccaatctcctcgggcaatgtgctgattcttgagggatgttgcagtggtgatatcgtcatggggcggactccgggacagtctgccagttcgggggcgctatgggcatcggcaggggatatgagaggcgaatcgagtgcggatggtaacgaggacgtcctaatcggtagactcattggtttcagagcggaagacggcgtcgcagatgtcgattggccgtgggtcaaacacctcatgatgcttcgggctaatttgtgtggcccacagggacgccggatgatattcacggaggaagcaagaggcatccactcggattttgcaccagtataatccattgacttgtggcataggacgagaagagcaggcaaggtggctgtgggtgcaatggtgcggaagtttggtaaatcgttttcatccataagcacaagatcaacatcggcttccggtgtccatgcgacgatctgtatagcataccagtctaaaaggtatcgagcaatttcagaccagtgagagtcggcagtcacgtcggttgggtcgatgccccagatggaggctcgtctaccagggtatgcttcgcgtagtagaagagtttgcgccaaggtttctctttgttggataagctgaccagatggttcgacgggcgggctttccttgccaacaggccgctctaggggtagagatacatgtacaacagtgccctccccaggacggctacgaattcgaatgcttccattcagagctttgaccaaactgcgaacaattgaaagtcccagtccagtaccgacagccaaggcgtcttcctgagcaaaaggcgtgtaaagcttgctgcgcaaaaattcttccgatatacctttgcccgtgtcagttactgtcaacgtgaccaagtcttcgaggccttgccgccgagatcgtccttcagattgactagatgctgacaaggataaagtaacacggccagagtctgtgtatttcatggcatttccaaaaacattcataatgatgcgtcgcaaagcccccggctgtgtccggtagacccaatcccggaatgagacatcgattacaacttcgacgttggaccggtgattctgcgactttgtttgatgtggcatcaatacgggcaggtccgccgaggcagtagagctctggccgtacacatggccaaggcagatgccttcaacgacttcctcggcaagaatggccacatcggtagccacgagcgtatccagatgatgcggcaacttgtcggatcctttgaaatcgagcggcgactctttcttgcgtctcattgtccgccaggtcctttccaaagataccactttgctgaagtcaagtacctggttcattgtatccagtaatgtccggccacaggaattgacagtttcaagcaatgagttctggaattcattgagatgggtgctgttcaaaaattcggcagcggccaagattccatgtaggggactacggagttcatgcctggtgaaggatagtaattagtaactgcggtcggacatgtcgattatctcctagagactaagaaaacttacgaaatactcccaatgaaatcacctttctggcgatctgcgatgagggattcaatgcggctatattcagccatgatagacgatgaaaacccaagcactgaactgagctcaactgagttggtgaacacctgggtctcaattgtgctccagcagaaacaccctccgaaccactgcgaagaaacagcattccacaaaggcacgaatataatttgcgcggcatgtgggaaatactgattgagtaccgagttttccgcagctttccgtcgctttcgcgtggcctttgagagctgtgtagcactaggtggggaccggctggtggtactggtgccacgaagggccttgtcttcggattcttggtcgtcatcatctgaggtcgagaggagcccatcgcggtgaaaggaccacagctttcctttgggatagcgtcgaagcaacaattgcaggaaagatcggtctaagttggcggcagggcatgtggccattgaccctgcttggggagcaaacggttcttcgtttgttgatgctgacagtacagaggcaggtccgcctgtgtcggaacaatcactacccatttcggtatccatcaaagggctattgttggcttctagaaaaatgaccccaccgtcgctacccaggtcaagactctcgcgaagtaagttggctgctctgcggaaacaccaagagttgccttgtgaatcatctggtggtagtttatttcggctgctgcttgtcagccattctggcagagagctctctactgtacccgactctacttttgaaccgttgtccaatttcgaactgttacccaatttcgaatcggacgagacagagctgaaggaacgcgcgtcggtgctgagtgatcgatcgttcggtggactattggagggcgcttgcgatgcgttttctgaggcatttccacgagagccaccagagccactcattcgattgtaagaagatgccggagttgctgacgaagggccgatactgttggtacgcgacgggtcgatattatccacgaaactagagcttccttcaacgaaatagctgagcccgcgggaaaggcgggcggcccggcgtccttcagaagcctgtctgcaaatcttcaaatagtccatcacaaccatcgataaagatcccagtgtatccttctccagcggtgtcaatccatctcggggttttgtgtccagcacgaaaaaacaacccaaattgatattcttctcggttgtcaagggagttccggcgaaaaagcggaagttggggccgttttcgacgaaggaaaggtgtttgtagcgctcgttttcggccatatcattcacgactagaaattgatagtttgcattctcgcggtcattggggggtaatgaaacagtgtcctgtcgaatggcgtcaaaatcgggaagttataggaattaacaatgcggtagagctcgacaatggctccggggcagccagctcgtagaatgagcaaaacttaccttgcacaaactccatgtcttgcgggtgtcgggtgcccccaaccagacattgtcattgtcgtcgtgaattgtcggatcgttcaaattgagagattttgttgcttcggcaatgatgtgttgcttatcacgatccaatacagttataaacacccgctccacgttcaggcgcaatgccgctagctgcgcaaacgatgtcatggtactattcgaggtacctagaatgagagcttctgtgccaactgcggtcgctggtcggaaagttgcactgctgtgtgaaggtattgagccttcggagatcggtggagtgattgtacttcctgaaagtgaagaaaaagggaatccatcattcaccggaagccaagatggaaccacctcagcttgggaactaggctggtagtaacggtatagctccctcgccctgcgatctgcattgtgtaggccaccatggcgtgctttaggaacagtcatagtttgccgctagcgttagaagactgaggatacagtgctgcatcctcggactccaagtcgagattggatcacgccggtgacaatcgaggcagggtggtgagggtcgagagaagtcgaattgtacaaaggaagtgactaaacaggtaggaaattgttggagggatgagtgtaactatattagtaagagattatctgagaattgggaggaaagtgggatttcttgatttagatacggctccccacaatagaacagtaagtcaggtgaagcgcagataggccagggaagactgggtgaaaaattcggcatgcacagccagggacccatcaatcaaggtacaataaggacgggcattggcaaagtccagtgatcggataaatgtacagaacatgattagtgggaacgagcgatcggtacacattgggagttattgtatggggtacacctgctccaccgtttcgtcgcctctctcttgggactcgtcttggaattgaccggcaacttgagatcgtcgcaccaagatggcgcaactgtcgctggatcagcatattgactggagcacgatggagtagaccggccattgggcagtacggatgtggacaagatgtggacaggagtaggtttcaatggctgtggcgtggtcctgtggcgtgttgaggctgcatatcattggctgacggcctcagatcacatgatttgccagggtattccgatccaagccaagtgggccaatgaatcttcacgatcgttctagtagaagtcgctagttgcaactggttactccttgcttcatgcttccatggcgtagcatgttatgtccacagtctcgatactgtcgaccaaggcttccacatacatgccaatgccatgatctgacacgggctgaaattagcgtcgcaagccctatgacgacagtggcaaattcttgaagcagatttattattcactatgtatctgaggaaagcgatcgtctcttccgtcatgggcctgaacacctaagatgatcaaaggctcacaatcttgtattcgacaacccctccaaacttaatccgcctatgaattatgaccggtcactgcaccccagatatacgccacccacgacccgattgtcaacaaaatcagagcactgaagcaaattatggagacggtccgggtgcgccggcgctgggttaccaagttgcgttctcgaatccgctcgatgatagccgcacccgatgtcaaacgtttgtgccgagtccactgtaacggcgccaagttatcagtcacaaacgagccaacaaggatagctgcaccgacaaccatagcaccggcagcaagaactaggtagacctgcaccactcggcggtatgaatcgtcatctgcgtcctgcaaagctcccgtgatgatccgaattatgatgctcatactattacgatttccaacgtcaatttgtgcctcgaaccactttttttgatgcagggatgttggatcaagcttacgcattattcatggtgaccttcaaagcatacgcggatccaaaaaccgattggtgccacagcgtggtgcgaatgctatcgatgaccgacgttggtccgaaggatacggcaatggcgtagatgccgaacgcggcccctgttcctgcctgcgatgttgcaaaattgatgagaaccatactcaatagcataccaagaccgcaggtaaacactaaattggtcagcgttggacttttatctgatccttgtgatcttggagatataactcacagacggacgcccggttgcctagaacatcaatgaacacgcccaagcagggaacgaggaagaagcctggttaatgtcagctatatccagctataatgagcacgcattccaccaatatcatacctgcgtactgcgaaagagaactataccacccggccttgatggaaccaacattgaatcgtttctcggccagctcggtagcattttggctgaagactgtcgcagcactcgtttgaaacacagagaaagacatgacagcccagaacatccatgggagctcgaacatctttttgaattcaaactttttgttcttctctgtcagttgctccttggtagctccatcgcgtcgtcccttgtaatggcgattacaatactggttgaagaaccagaacgctgcgctggccgcattcgtgaacagattcatgaacaccgaggtccaaaaaacccacgcgaagtttccagttttctataccttgtcagcattttcttaccaagttaatcggaaaagagcaatcacttttgcaatgatgttggccgttgacgtgccaataaacccgcctatcttgccaactgcgagctcaaatcctagagtggatgcaaatccattgctaggggggaaccaagacgagaacatcttatattgagcgatttgtgtggcgatatcgccgagtgcgagaatgactcggccaccgatcatgaagttgaaagagcgcacggtcgcggcggcagcgacgaggatggaaccgatggtatagacgatatttccataaacgatcatctctattcgaaaggacttgtcaggatattcttcgctgatttgacagactcgacaacataccagctccaccgactcggtcggtgaccacaccacttatcaaaagcaggaccgttgccatgaaattctcgctggcttccaaaagcgaaaattgaacattgtctatgttcatttgctgccagacaaaacccgtcagtgaatcgtgcaaatggacgtttccatagcattctgtacctttttgatcgtgctcttcatagcacccgttacgccagaactccaatgcgagccaaagctaatgcacgatatcagcgcgaccgcacacaactttgctgcaagcggcggtggcttctttccatcagagtcatcgcccggttcctccggtacgctgcggatgtcttcacggacaggcgccgacaccacgtcgaccgacttcgagtccgaagtatcgactcccattatcacaactcgatgctggaattatatagcaagcttctagcttgggttgtcaagggaaataaagtactttcacgcaaacttaaaaaaagacattcatgccattatgtactccgtactatttaaggatatctgagactggcaaatgttcaagacaaagcggagccctgccagtccgtgctacagcctacggtgagctgatattggtgcagatcagctcgaacgtacgtaaaagggcaaagaagaacgtcccctaggcgcttggcacatcagataagatggttgagatcggggccttgtcccgaaaagagcctagcgctgcgcatatactccagttcggagcaacgtcggtgaatttaacatttttttaagtctcttcaacggctttaggaaagccctgcgcatgcccgcagtgggaccctggggtgcaaggcttttctcggcttctccgggctgtcgtcagcttgcaaatgccgttatattttgctcaagtttagacccgcttggaatctttaaacgggttacgctgggcagattcagattattatttcgtgcgctctcaccagatctgtctgtcttcgtcgggtctcttgaactgtccgaggtacaatatacgagggtgatgcgagctggtctcgtcatcacctttgtcgactgctataatttgcgtaaagactgagatattggaaatttcaattgaacagcctccagatgtggcatatcaataggcttctaaaacaaccccggcagtgggcctctagtctagagatgtatgcagtcatagagaaaaagaaaagaatccaatacaaaattccacaaatattcaacgagaaaatcaaaaccgttccatgagccgcttgcgcacagtccacatgcgagctcgtttgccgtagatgtacataggaatggacatgagcatgaagaaaagctggataccaccaatagacaggaacacggtgcgtgaaccatcggaatcgagccaatccacgataaaaagggagaaaataaggccgtggagaacatctgcaagagaaaaaagtgttagaccagacagacctaacaaaaaatgaaggatagttcaacatactcttgctaaagttaagtgtcactagcgcctcgccggcatactggcgatagctatctacacaaaaagtgatagcggtcgtgctgcctagacagcaaccaaacgagatcaaaccaaagaagatagtcgggacaatccaagagtcaccgatctcagcactccacccaaaagccatcaggccgatgacagtagacaacgcgataggaattgtcatgacaagacggaattcaggctcgtagatgcccccattgcgcctggtcatgaaccgggcgataatgtcggatactttgcccgccactccagttccaaggagaccgccgataaacggcgatatgtagatcaggcctgtctgcaacggggtgaagttgtactgatctttgctctcgaatatgtgtgcaactgactccgaaagtacgatcagccacccgaccgatagtgagtataccactgttgaccacagcacggctggataggcgaataggatgaatggtcgcgcggcaactcggtaccagctgtcgtgagcgattcgtccattccagactctaagtaatcgggagtatggaatcttcggaccttcacgcaatcggtttgtgtattgtagggttgcaggcagcggtggcccggtaggctctagtgactcggtcctcgcaggtgatgcggcacctcgacctacggtgactggtcgagctgcctctaggtcagctgtctccagatcatctgggtgtgcgctaggcaaaagggcgtgaggtggtggttggaggaagtcatcgcctttctcattagccggggtcggcggttgaatgttgatttggtcaccattggtagcattaccggcctcgcaaacagaatcggacttttcagtctcgactgcctggcctccgccttctaggtggtcatccgcgaatccaaaatgcgcatgtttggacttcttcggtgccaatgctggatctgaatggtcctgttcggcggactcgtcctggggttggacatacgggtgccgccctcggaagccgtgggaaacgaggtcggagacactctgaccaaggccacgcgagcccttgtgtttgtgcacacgcgggcggggtgtacgatcccaaaatgtttcgggcacgaagaaaaagagcaagactaaacacatgcctgcaaccatggcgacaatccaaaatacccagcgccagcttaggctttcgatgatggcggcactcacgagagggatcaggttctttccgcctagtagcaagagcgtgtatatccccactcgataggctctttcgtgtaagaagtagatctctgcaattgtggcagatgggagacactcaactgggctcacggcaaatccttggaaaacacgagcaaccacgagacttgcatagttcggtgacgctgcgcaccaaattgccgagatcacaaacaggatggctcccaggaggtaaaccggtcgtttcccgtatagaatagccgtgggcgacatcacaacagaccccaggcccagccctaacatatacagcccggtggtgaaagcaaccttctgtgtactggtatcgtacgtggctgcaacctcgttgaacccagccgccaagataggggtcatgccgcctcccatcaggcaatagaagcccagcgagaccaacgcggtatctctttgccatacaggccagttcaaagggtcatttgcagagtcatctggttggggatcaagcacaaattgtccgtccgctgttttcttctgggttggaaccgtcgaccgcgttcgagaattagaccgcgagggcggataggacgaggctatagaagatgtcgatgtccggtgcggttgatgcctcattcccaagggttcattgcgatttgaggataagagaagtaccgttcctaaatcatgccagccagttgtcagacccgttccacaatatcatctctctgtgacaggactccctactcaccaggaacttcgtctgtctctcgatcacttaggattcccagtgttgatttggcgcgataagtctgattctcgctacgctcgaaatcttctttggtctttcctccaaagagtcgtctccagcgcgaagcagctggctgctgctggacggggtccaccgccgtgttctcctccattgtagaagaacggtcttctgtcggtgaggccatattctgttcgagaactaggaataaggattcgagatagtccctacaaaaatatgtgaagtatgtcgccgagtcttgcgaaagcgatcaacgcttctggatcaacgcaagaggcagtaaatgaacatcactcaaaggcatagtttgatggagtgagaaagacgaggggcgaggtagtagggaaagaaaaatctataagtggcggggggtgatatatagtgtcctagggccattcgggctccatgcgataagctaaaatggtggaaacacaaaaagaagacaagcgacgatcccaaagaggcagtggggggaggcggtgagagcgtctgaaggtactcgctgagtaccgtgactgtcgcccagccgccaaggttaaatcaagtcgccttgaggtactatcattttgatcttatcagagatcttcttgcatatctgcattctacacatccctgtccgtggacagaactgctggaattgtccgagaatgacggggcagataagcacaccattttcggacaaggctaagctccccacaatatgtcgttgataatgcacctcgtgggtcaacaatccgcgttgacaggtggatctttgggctacgcattgcacgagataacgtcgagaaaacaatacgctacactcacatatctgtcgacaatctactccatacagcgagggttaattgcactaggctcgaatattcccaatcgccgaatgcgcccggccattcctggtatatgccaagccactcaaatccggcgcttgtcgcgagagttttacttcgcgtgatctgcctatccataaacatatctttcgacgagttcaagtgtcactcactcaaatcatgttttcaataccccaaaattgtctcagctgaccgccgggagatgttggctgtcgtcattgtgcaggccaattgcgggggaaaggagccccagctttgatgaacttgtcataccgttggatgtcagtgtctctgttcgtcggtgctcgagctagcatggcgtcatgggtcagaccatgggcaaccttgtactacatcatgtttggaagaggaagatacaacacgccagttgcgtcaacggttattactacttctagggatgccacctgatgtgagtccacgaaggatcggctgggatcgacagattcgttttagggtgctttgattattgattgccatttgctatatgctgtgggtggattaagcaacttgctaatataagacaagactttctagttatcatttgatggcattgtccgcccctccatctgaagtaggaggaatctggcaaatccccgggaagtacatactccagtcccttgtcttctctgctgtggcattctcatcaagcttgggatttgctagtaataagggaaagagacggcgtatgaggttgtaccaacgtgatggcatggttctctctgacagaaacccttgttttccatccctaaaaatttctcttgtctaacctatttcaggcatttacacataggctttttcaccttaaggcctgcaacggctagtatagtcctttgacttgatactatgttgctgttctagggttcctatacaggtgtgtaggggaaaatggctaatattacgaccatagcatactacataaatacatagcagaccattaagagtacagttctccattcagaccatgcccatctacgttgatggccaactgcgtccaggggtgaatcaaatcccgccgatttccattacaggggccgtttgcgggcagtcacgtgtgaaaccccctttgacaattctagaccaggttcaacacaagtgctctttctttgctttgaattcttttgtcatttgcttatagttacttcatcttaatatttctacttctttcttactactccacattcatttcgatatccatctttgcccttgaaaaattgtccggtgtcgatcaaaccgtcccacgcgacttagtgtcgtgtcatcactcgaagaattctctcaccttggatatcggttcctccgctttattacggactataaattcaaagcgcaatctcaattcttattcgctcgttctgtgggagaaaccgccaacatcatgaagatcaaccagtcgcccttccttctcttccttcttcctgccatttcggccgtgctcgccgacacatacaatgacaacatagactctaaagtctcgcgggagactgtgggtaataatgctcgtctcgttgactcggatatagtcgcatccaatgtcgccaaaggggcgccggacgtccccgtggatggcaaggatggcagaccacacgctggtccgtgggtggaaaccaatgcagaccgggatcgcacaggtctccagggaggcgatgatgttgatccggtttctgtcaaatatgataccaatattccctcttcggaacacctgagcaccgaagaagggaaaatgatcccgcattcaaacggcggcgtgatggatgatccgcatcgggcgggcccgaaagaagggacacgaggaaccgagggtggtgtgtctgagaaaggaaaagaaagccaattggcatctgaaaaagtcccgggagggccgaaggaagcgcctccgttgccgcatagtgagaccaagaagttgggccccgacagcgacgacacaacaaccgggggtggaagtcggtctgcggagggtccgggaagccttggaatgctcggggtaagtctttctttatgttgcttgagtccgaggtccttcgttgagcaagtgggattaatgtccatctagaaacccgacgacctgcctgaaaagccacacgatattccacaccccaagtccccgggcacagcaaaggaggaccctataggccttggacacgacaaagtcaccccggggtcgtcttcgagttcttcctcgtcctcgtcctcgttgggccacggccacggccacgatcacgatcacgaccacgactctggtatccatgatgccggcagctcactacactcccttgtcttctcattcaccatgattctcgtctctgaaatcggcgacaagactttcctcgtggctgcgctgatggcgatgagacatcctcgcttggtggtgttcagtgccgcattcagtgccttggttatgatgactgttctttcagcagtcctgggccatgcagttcctactcttatccccaaaacgttcaccaaattcctggctgccattttgttcttaatctttggtgcgaaaatgctcaaggaaggccgtgaaatgtctccagatgaaggtgtgggtgaagagatgcgagaagttgaggcggagctcgaagagaaggagcacgagcagctgcgtatgaaccgccgtcgttcctcggttactcctcacaatctcgaagccggtcgcgctggaggccgtcccaaaacccgtggctccggaaaccgcctgccttcgcctccggagagcttgtcctcgtcctcgtcccgtggctcttctccccagccccgacaacggctaaacaatgtcgtttccggattaagcaatctattttccctacttctcagccccgcgtgggttcagacctttgtcatgaccttcctcggcgaatggggcgaccgcagtcagattgccactatcgccatggcagctggccaggactactggtgggtgacaattggagctagcgctggtcatggaatctgcaccgcagccgccgtactcggtggacgggccatcgctggccgggtcagcatgcgtgttggtatgtatcctctgcttgttttcctatatatgacacatgctaatcttgacattcatagtgactctgggcggcgctgtggcattccttctgtttggcgtcatctacttcatcgaagccatcttttgaagcgctgcatatccgcggttgtatgtgtccatggaaacttatcgttatagtttttggcggctgattttgtctaaaattcgaatgaatgtatcttgtgacatacctacgactgttttaatactataattacgtgtctggcccacgcaatatccaggttcacaatctcacatcaaaatggaaatccaagctctgagtactttgaccgtctgttgatgcatcaacgtgtcgttttctaccaatcacatagagacacggggcatgcgattacatgaggaaatgcacgagcctacacatgtggtcgagaaagtgttgtgatggccgatctcttcggtcttaggagtaattctcctacaaatgaacattcgtagttccaccacccgctatactttgaacgtgagtatccattctaaggcgttctaataaacctagatatgacgtaaattaggcgcccagtgtatgagactagagatcagcgaatataaaatacgaggtagatatcattcctaatttaacctttgaatcttcccgttcaaggtctagcgaactcttcaacatgtcatggtccaaagtgaacgaacaacgatgtgaacgtctacttggcgaaaatgaaacatttatcaagatcgttggtgatgccgctcgtccgttcaatcgtgaacactgggctatcaacatcattgtctcggtgaccccgctaggctcactcgccaaggaaaatcaatcctccgtcttccgcgaggcatggagggctctgcgtttcaggcaccccacgatcgccgcatatatcgtggacgaaaccaaatatgtctacgatatccccgaccttacggcacttgagaaatggacggcagaaaccttccaggtgattgaggacaagacggttgatgaagtcatcgcatctgccacgcgtgttccatatgctactatgaccttttttccccagacgggtgagctattgggccgctcgcaacactggagaacggatggcatcggtggcttgattctgatggacgacttccttgacctagccgcgcagtctgctgcagatacttcctccctgccatggggtgaagagaccgaccggttagcgtcgtgtgttgaggaggcatcgtccagtttcataacgtcggagaagcaagataggcaactaggccagcagtgtgttgcaagttttggtcatgccgctggggccatcggaatcgcctcgcgcgcaccagccgagacttccccaggtggtacgcgcattagccgtcttcatctcaccgagcaagagacaagggccgtagtgcaaggttgcaaggctcgggggctctcggtaacagcagcagtacacgcatcaattgccggagccaactatgcactagccactgctgaggatcagaacaaacactatacgagtacgatacggtacagtttacgtccgttcctaccagggccatactctggtcgccagtatgccagcacaatcctcacgacgggttggatgttccctgtttcgtccgagtcgtcatggtcagaccgagcaagggcataccatggcgaataccgcaaaggtctgagtcatgcatacatttcggcgcatcgcgaatacgccattgggctatgcaaccttcttcgcagcttgccgaaggacatcccttcgccgaccgatgtggatatcagcagcctcggtgtgtgcgagaggtttgtgacgagagaaaagggaactgcagagcggggaattcgcatcgatcgagtctcgggcggcttggatatgatcaatagacaatgcgtgtgtcatgtgtggacttttcgagaccagctttgtttgaacttggtatacaatgaggcattttacgatagggcggagggggattcctttttgcagactgttaaaaactccctgctgcatgaattgatactatagggtcctaaagttttataactcgaatgtatttgacccatgatcacatgatttcgtcgaaaattcaggtctcacgccaagcttttacgtaaaaataaagagggggtttagggtttttagtgcttagggggtttttagggtcttgacctgataatacaggcatcaaattacttaatacggactagcgtgtctcgctttataaataatccgttgttccgagtaacgcagccccgaaaaccctgacatctggccactccgctcccttaattctccaactctttcatcaaattcgtacacatctcatcaggcgaccatcagaagtctttcggtttcatccgaatattttttttttttccagttatatcaattttcaagcaaatcgcgcgaaagtgaataaataacaacaaggcttgtaggggcttgactcctgccctacattgcccaccgccttccatggcacgcatcacggggtcccgcatgacgcgaagtcggagccgagaagcaaatgcagcgtttatgccaaataaggggtcgttggagcgcaattgtaggtaattttccggttgttttttggtgtagcctcagcagcccttgaggcggatcaggcaactacgcattaagggaacatatgcatagttgtatattcctcaatgcgcgaactctctccataatcctttcatctgctcgtcccgttgcctcacctttcatcttgttgcctccatcacttctgtttgacagttgaatgtgttctgactttattcagggttaagcgggctggctgaggagccttctgctcctcctatcgggtttattgcacccagagatgtggtaccagaatcgcctgaaaaccaagaaggtaataccaatgtgtctggtacaaccttgtgtcccaatgatgcggagcccgccgattctcgagtcaccgatgctcgagtcgccgataaaatcgcgactcacttgccgttcgttcaacagcaggcgacccttgtcatgagcctgttggttcacccagacttcaacccggacagccttgcagccgagtcgaaaaagctcctcgattctggccacccaaatcgcaaacgattgaggcgattcgtggaagggctgatcgatgaactggaagactgtcctctttctcgtgatggcaagtccctattggacgtctcccaggctcgtcgtttgctttctcctgcgcaactagatgcatcaatcacatatatttacatgacaaattgcgctctgttgaccctcaacatgttcctccccagcattggcaccgaatcccagtcggaggttatccaacagctggactcccagtttcctgcatgtgtcttgggcaaccttccggacagttctacgccaaaggaacttggggcgagtgatactagcgaggctactttcaatcttgccttgagtatccgcacacagttcttcatcatggagttagaaagacgccaagatgagcaagacttcagcccactttccatcttgagacaggtctttgcaatagacctcattcccagcgaagattactcccaggatatccccggttccttccgggggttcaacttgccgggtgtctttcaggacgaggatggccatctccctgaaaatcttcctgagaagtttctcatcgccgtcaacgacagattcaatgaacttcacgaggagctttctgagtgggactccgttgatattggtggtctgaaaaaggcatatagatggcggtcgtttgaacgagaccttgcccgttggatctatgttcgtgacagcgaaattaaggaagacatcagacgcttgtcagaaagagtgcatagctcatccacacctcgtcgccttacttctgtcccggtcggaactcccaatcgacgagtatcgacagtgcctccgtctcctcagaaagaccgactggtgagcatggcaccggatgcaggtagagtgcccccgtctcctcagaaagaacgactggtgagcatggcaccggatgcagccagagtgccccaggcagagacgacaacgcaggcaggacagacagtaccggtggataaattgcctgaaaacaacgctcctcggccaagtgccgcttctcaaaatgttcctgaaaaaagtgtctccgaccaagtcgcacggccggcagcaaaagatccaggacggcgcaagtccaaaaggtatgctcactctactccctctctctgtggctactaactttcgtctatagcaactaccgagacccggcctcgttcgcggcactcatgagacgccaggctactagtcatcagcaacctgtctcgaacgaatcgcaagcgcaaaccatttctacaaagacaagcattgtggcccacgtgattaatcctggccttactgctagtcgcgcaaccgaggcttttgaaattcaacaatcccctgagctgggatatacagacatcggggatgactctacatacgtaaacaatgacgaggacttggatctcggccatggcccgggaccagatgttataatatcaaccagtcccccaaactccgctcgaatcagtcatgtcagccacaatcccactcctcggttatctgattcgcccagagatggaaacccacagcgatcagtcccgatcgctcggcgcttcctcgataagcagaataatgctagggttgtgtcgccgatcagccaatatgatactcaaagtactgtgttggggaagcgaaatcggaatgccgatgtcctagatgatgactcaactgacgggtcagacgatgagttcgagcaatataatcacaacgtcgatccgaggcgcagggtcgaaaagtctccacacaatgaacctgccgcgaagcgacaccacccccaggacaccgcgtggtctggtggagagcagtcgcaatcaagtatcaatagattgttccaccacaaccagtctagccagacgcaagtttctcgaaggatccaggcggttgaaagtgacgatgccgccactgatgaagagaccaccgttgcacagctcgaaccgccccctagtacccagggtcggtgggcagcctcccaggctgcgatggccaggaggagagttccgaagaccagccacaggtggacagatgaggaggatgaacgtttgcttcacctcatgtcaatttacggcactgcctttgctactataaagaagcaagacaacgcttgccccccagctgaaggcggtcccgtgcttgaacgtcgttctcaggtcaattgtaaagatcgtgctcgcaatttgaagagaaaatatctcaggtaagatatcataccttttcgtccttagtgtgatgtgtgcggcagttctaacccgttgttttacagagagggtcgaacacttccaccgaacttggataaggcagcaggttgatttgacgcattgataattacaagcagtcgtgtttgctcttgcgtttcttagcgttcatcgagatacccaatgagcatatgggatggcgtttttgagcgttcatttctaggctcctgctttcgttgttgcttttcgtatatgtttttttttttgccttgtatagggctcttctacgaagaaatgttgttaattgttgaagatttgtttactattgttttatcttctagattttcagtactgccaagattgaacgagttgttcttttacatacttatcgccacaaggaccatcttttttaatatctcttgttaatcacacaagatacgctctctaaatcaaaagacgtgcaatgaagtcaaagcaatactttcagccacttggcattgtccatgtgttcgttcctcttaggtatcctttctagcagatttggcaaccttctcaagatcctttcaatgcttttgctcgtttgcagaatgaccatccacaaggaaaagaaacgagaatggagccaggggaagtgttttacactgctgagacagagacaaaatccgagatcagatagaatctgtactgaaaggatacactgactcaaagtcaaggccagaatacaagagttcaattgctttgtatggaatgtatgaggaatcaacacgaagctaagagattatgacatattgcctgcctctgcctgttctgccaattgctttgttgagaaactttcacgtctttgatatatgacattgatagctgtcatagtgtctcaccaccaaagaacgttattcattttacgagtttcggcgtgcatcagctagataaagaaataaagattccatacagaatactctaacatgatgctacgtctacggataactcctatacagtacatagcagatgagacatgacctttgtataaaaacagatgtatttcctaagtctaactccccatatcaattcaacaccaccagaaaccgactacttgcatcaaaccagacattcaagaaacttgttcgcacgttattacattccacctctcaaaatgggcaacgacagaggcagaaacaagggcagaggtaggggcaagaaaagaagtcacattcacagtctgaaggagaacactgtcgccacgacggtcgcaacgaagctcgacaacaagcctaagggcaagatctcggacaagcatcactgtctcagcaagcgaccggagcatgttcggacttcacgatgccttcgtttgggccatgtggtccagtgtccgattcattctgacagcttcccactacggttgagcgagtgtgtgaagtgcaacagtgctgacaggcgacaagtgcaacaggagcgcaaagatagaaataagtagatttttggtcctttaggttagatagaaatttcgaatccgatcaaaatcttgatgcaaacttcattcattgtacatccaatcccgccaccatctgagcacattcatctatcaaacgtgcaatgccctcggtagccgcagcgctccgtggaatattatgtcctccctcgtgttgatatgtcaatcttttcgtagactcagacaaataagctaattgcagtgaagcgggcaaccgaggatcaactcgcccataaacgtggagcgttgggatttttatccgcagctgctcgggcatctggacagtatccagtccaaatatatccgaggggtcaactggggccgccggattcaaatggaggtcagtatcaccatttcccccgggagtggtccatctgtctcttccccatttcaggatcgcttccttggatgctcgttcgcgcagagctagcttggtccgtttatcccactcgcgagcttcgtcagaaatggtcattcccagcgtttctaacaccgacaagaccggtccgccgcaaataaatacgacggctttgaaaggcaatggctcggtcggcttctctatctggtggaaccaaatataactggcaatcaggaggcaccctcgagaaaagcataccattccgtcgtatgggacattgttgtgttgggtaaggtatttatgaaaatcttgacaggcagcccgaatatcagacacagttgcctttagccaccatgtgtagtaggggccgtctgggtagcggagatccaggccggcggctggtttggacgtgaaagggccgtcgatgaaatgaaacgcatgctttgatggcggcaagtgggcggtgacagccgctacagatcgactgttaggttatttttgcttgcaggtttttatagtcagaaaaagcgtacccagctggtcctggaagatggtagcagaggaccctgtgccgtggatgcatagccatttcatattgtgtatttttcaagagtcaagacaggccgaggtaaactgtagtcaggtcaaggctaggcatcagttagaaaagtatatcgaaatctcgtatagaggtgggaccatgttgatctgcgctgatgatactcccaggttcgttacgcttctctttgggctttaaatgtgtcggctctgaagaaaaactctaaaattccaaagtcctaaatttctaggctgtggaccaagaagcatcaacggcaacataaacataccccggtatacagataggttggtgtcaaagagaagtaattggccatggcgaacacgtacgaaggctattagatttctaagaatgttgatttaatcttttctagcctttcccaccgatctgggaaccggatccacaggaaatacctgctggcctctccgaaaaccttcgtcaaaaatcaagttagagcgattccgcagtggctctggcatgatccatgagttttggggatcgcgaagccacaaacgtagcaggtgacgacttgggatgttttcaattagccaattttcatgtgtacacgaccaatgcctgcttaccgattttccgaatcatctatatagctgtttcgagcatgtatcatgcttaggttattgatgaattgcatatcgcctctctccagcttcatggctacatgaaacttttctgcaagaaagtggagagcatccagtgcctccacctggatagagcttagcatattcatctgggatcgagcaccaaatccagaaaacgagcgtcgagagaactgcaagatgactcgttccggagctccatcgcaagctggttggtagaacaaaagcggccggtgagtgatcagaccgggctgttttgcactaattagggttcaatggcacgtcagcaaattgggtctttttactggagcatcggattatcatcgacacggtttgcacacctgggtatcggccagtcctccgccaatacgcggagtaggtcggggcgggtctccgccagagaattgtagacagtccacgcactcgcgagaagactttcaccgccatttacgggcccacttaggacgaagagggagacgatatcccccacatccgtgtgatataccacttcgccatctgaatatgctgccagggaaaagttttgtgcctcgttggggcgtcgcatgtcggttatgtgggccaacatgacatctgccggctgcccctcgaattgatggtcttgccgaccgcggatggcggcaatgtgcgaagaaatcccgacatagatgatcatattctcttggcgagaatagcgttctactggaattcctcgaataagtgtaaacccatagcctgagtgcagattgtctgatgcggaccgcaggatcgagtgcaaattcggtagaggaaacgtcgacgggtccagagtctccattggctgattcagttctgcagagttatcagtcttgagcgaggaatacgagagtggctggctgactttggaaatgcttgagtgctgcatctatctcgaccagctgcggagcttgtaaaatcaacaggtacggactctcagagcctgcagcgtgattcatcgagatatttcctccttcccaggccatatctgcggtcaatctctggggaaatccatgaggaaggattttttccactggtccttcctgtgcatagcggaacatacgagtgtcgtactcgttgcgatctggtaaataagggagttggtcgaatgattgtgccatggtcgccttgagatggagtattacagttggaggcacaaaatattgagggcatgaacagagtgaatgctttataattacatgggatgtctcaggatccatctctctccgaaatattttacagttttgatcctgaagggacgtatctcgaatgtgcggccgtatactccgcagtcccgcaccaactcttcgacatcacctaatgataatccgtaaattattgtagttcggtgaatgtgacctatcgagagtaaatacacgggtatgtgatgatctacataaactgcaagataattggcaattcagtcccgagctcagctctgggatttcaaatggatcagacagaagcagccaattgcgaagcttcaaatgaaaattactattgtggaaatgcctaccgaggctatttgggattatttaagaaagacaaaacatgaataagtagttaatacttgggaacatattcattttatcgtctgaagttcctaacaatcaccagaaaacatgaccatcctctccaggcacgatcgagcattattcgaaacaacgaaacgtgttcttgctgagattgtgaacgaaggactagtttatgcaaagctagagtccactgcgaccggagagccacagatactgtgcctacagagtatactcaacccccaggatggaaccttggtcaaggtgccgatcaaagctggcgctgtcatcgagacaaaagatgatctcgtggtgtctgttgtacgaccagacagcttacagccacctgtgattattgcggataccaggaacggagagttggacccagggacactattcaagttcctgagtacttcgttcagtgacgtcgctagtgagagagtagtggatgagatcgttcaggaattgcgcaattcagcggccaatcaaggtgagatagcattgatgtcacactgtcttcattgtactaaaaatatccagagaaatggctagagattagcgaatcccagccattgttgagcctcaaggatagatctgctagctgggagcggacattgatctatggccacccgagtcatcccgtaggatcccttgataccgaacctgctggacaaaattctgactttgacattgacagtaccatcgattgtgttttgctcaagcgccgctgaagcccgtcaccgccgcggatatccctgagatgctcaacccaactctggcatttgtttctgttccacgtgccaatcttcgtgtgacaggccacttcgagcaagagttgcaaccactcctggaaaagcttgaaattccaaaaacaaccggtgaccgggtggttgtcccttgtctcgctcagcaattaccctctattcaccagaggttcccggacaccatcgttctaaagcttatcgcggactgtgccgatgcgcaggcatcaatgcgtactctcaccatacgaccagagttggagttcaagtatcacttgaagctctcactggcttgccagataacctccgccctgcgaactatcactccgtggacaacttgtggcggcccggtccaaacagagatcttggaaaatttacttccaaaggacctctgggttttccgagaggtagcagctgtatcaggcagccaggaagatttcaacgaggcgcgccacctttcttgtattttgcgagatagcctggagaccagagctagggaaaatgatgaaactcttatcattgccgcagcattggcccagaagcctagtggagatagtcgtacatatgcggagattttgtacagcttggaaacaatctcccagaaaagggaatggttccgaaggtaagtgcaacgatcagccacaaatatcataacagatgctgattcccgtaccaacagatacgttacggtcctatttgagcttgtgcttcccccattggtccagtatggaatcggactagaaggccatgggcagaatcttgtggcccgtgtttgccgtcggacaggtcaaatcaaaggatttgccgtgcgggatttcggaggagtgagaatgcatgtcccgacgttgcgaaaccatggcgtgagatatgattcgctgccccccggagcagccaccttgacggatgacttgcagaatgtgtggagcaaggtagaccattcacttcttcagaaccacgtcgggctcctgcttgagtcattgggattagagaaccatggaggatggacaattacccacgaggtcctatcgacagtcttggggtcggataaaggctctcccgggtataccttgttcgaatacttcaccaaggacacaatgcccttcaaatgcttcctgagaatgagaatggagggtaaataccgtgatgtgagtcttccgatgtggtctgttgctcaaactattacgaatctctgacgtttttcccgcagtacattgagagggaggttcctaatttgcttcatgtcacttagcaagttcaaggtggatggaagagaacgcaacgcgagtatatatcactgggtgaattgggaggttgatttggtcaatacatgtatttctttcgaaataataccccgcaggaccgcccctcttcctttctctttctcttttcttacaattccccgacttctacaccttgaacatacagcgaataccttcgctgtgctctcgtaaacctgatgtggaagaatacaaaaccgacccatattgccttccaagcacacaatcgacatgtcctgacctgtttacaattcgacgccgacaagattatagtcggtagtgacaacgccaaaatcagcgtgtatgatactaagaccggagcgcttcgagcaacactggaaggccacgagggtggtatatggggacttgaataccatggcaatactctggtctctgtgtcgactgaccgatccgtccgagtatgggacattgcaaaagccaagtgcacccacgtgttcaaaggtcacacatccacagtacggaccgtacagttattgctccccgttcaaattggccagcatccagacggtacgccagtgatgatgcctgaacaacctctaataatttcggggtcccgtgattcaaccatgcgggtttggaaactccctcaacctggcgacgaggagtatttccctcccgctcaaagtgacgaggagtgtccgtatctcattcatgtattggctggccatcaacactccgtgcgagcaactgcagcccatggggataccctggttagcggtagctatgacagtaccgtacgagtttggaaagtatccaccggagaatcactgcaccggctagaaggtcatcgatacaaggtttataatgtatctttggaccatgagaggaaccgctgtattagtggatcaatggacaacatggtcaagatatggtctcttgatacaggtgcgttgttatataatcttgaaggccactcatcgttagtgggcttgcttgatttgaaagatgatctgctcgtgtcggcagctgcggacagtatgcttaaagtctggaaccctgcgaatggccattgccagcacacgctgagtggccatacttcagcggtcacaagcttccagcacgatggtcaaaaagtaatctctggttccgatggggaagtgaagttgtgggatatacagactggtgtgtttgaaagggatcttctcaccaaccttagcggtgtctggcaagtccagtttgatgcccagcgttgcgttgcagcagttcaacgtgggaatctgagctatatcgaggtaagtactcatctaaactgatgtgttgtcataatttgctgatttatgaagattctcgactttggcgcttcccctgactccataccaactggtcggctgggggagcggatactagtcgatgagctaggtcatgagatcgaaagccggaagagacaaaggcagaaataatctagtgtttgattagagtttaaccacaacgtcctcaaatatttgtactatcttcgatattactttcttaaaaatgccattggcaaaaacgtaaattctccgaaaaggatatcggagtccatccgggagtaaataatgaatgctaatatagtctgctcatgcaaccccaaattaaaaacgagtgtggaatgcctatcccaagacaggcagtaaatgcaacacaaatccgaccagcagatctaacacaaggaacagaaacggtatatcatccctaatatcacaaacgccctgttgacgaaccagcgacggtataactgtacatgcaatgtagagtacagggaatcaaaatgacagtatatgcagcttctatctcaagacctgaaggttaggagcttcacagaagcaagcccatacccacaaaaacagcgccaagcagtgaggatcccgcgcagactgttccagcagcgttgtttgtgggcgtgggcgtggcagttgcggaggcgaagacagcggacttcgataaaacgttgccactcttagagttggcagttgataccgcggtcacgatgctggttggtgggttggctgttgaggcagcgacaatgattccgccagctgcggtggcagcagtgggtgcaatagtagtggaggcattttcagatgcagacggttggagattctcagccgcctggatgagattaaaggtatccgcgccgccacctagataagtatgctgtcagtcatgatcttgtttccatatggaatattataggtgactcacagcttcctgcaggccatccagcgcagggcacatcacatttactgtcggcgatcttagccgaatctgggggcatttcgttgccgcagtagcacatgttgccacggctcagagcagcgaccttgtaattgtcctctgcgcattgggcctggcaatgtcctggtgattggtaggtgtaggggccctggttcttgaatgattcgatagcagagtagcagcccatactggcggtggagctaagcgagtatacgggaagagctagggcaagcgcggacaaaatgtagttggaatgcatgattggtaggcgaggtattcgatcaacgaattaaagagtgaatagttgttttgagaaatgaaggaaagtatacgcaaaagagagagttgtttcaggtgccagggaggaaaaaaagggtcccatcaagcatctttaaggcggccgtttgtttgacacccgtcggttccatttttacgagtgtttttctgtggagtaaggctgggactgacgacatcgatgtccaatcgatcgactaaaagaggcaaaggattattctgaaacactaagcgacatgttctattgaacccgcaatggggctacatagggttcattggcttgcgagcggacgatcgccgatcggcatccccaggtgtggcgtctcgtttcccttttgagcgaccaatgacggcggacggctactcctgagtcaaaaagcatgaacttgagaaggagttcgcgtgtttctggtttggcgcttgccttgatcgagcataggtagagtgggtttagggtgttgcatttgtgaggaatctggcattgctggtcatcgctggtcatcgccggtgaccccttgtttctccttttctcctttctgttagtattctggtatcctgggtattccaaatactcttcatcttctgcaagatatcaggacagtcattgatgtgtatggcatagtctaattgggaaactggacatcgaaattgagtatcaaaatgaatttggatccatggttaacccgaaccttccgcactgttggatgccttgtatatcaggcaccttaccttatctaagacatctcaattcgacctggcggcccaatattcgggcaccctttttgacccagggatccggaacctccacagggggaggcaataatgatcattgggttattttactcgttcggattgcgatatttgtacgttgtacccgctggaatcttcccgtcaaatgccggtgagctgagctgtatatattgtccacgggtactccgtccgtactccgtattccgcatacctatcaatgcctatatcaatagtcgacggttcggattgaaatacgagctaataaactaagtaaggctaggtgcagggatctgccaataattccagttgataatgaaatccgacaggaaacatctccatcgcatagcgattaagcttcgcggtacatcaactgacattgtacgataccgttgacaattattcatggctgagacattaaggctttctttatcttagctgaacactagctccgatctattacacggacacgaaaccttgagctgggctgagacatttcctactttcaatacacttgaacatggaaaaccaaagttgaactgccaatcccaaaatgatcaacatgtaactatacagcacacttaccccaactctcggcaaaacagctaccctaatagggcaattcacatcggctatggccgccagccgacctcgggagaggggaagatagcaagaagataagataggccttgacgtgcttttgacatgctctttctgggctattgtgaatcccttcacgtcaatttcgaagacttataaatattttgattcggaagtattgaatcaacttagtccgaccatgaaaaccctcgctctcctcggcctggctgcagtgccatcgctagctctcaatatccccacacagcagcatctcttctccgacaacgatctgtcgggtcattataacctgctatcaagcccatctacacgggaaacctgtccccagccgcccaaggtcagcctccccgatgatggcctgcactcgtcgcagatcttcctcaccgatgatgctttccgtgctcgccaggcaaagcggctctcgcgcgcggtgcagatcccaaccactgtgggtgattatatggaagacccatacgatgaggcattcgagcctgtagtcaagttccaagcgctgctggaggagctgttccctctagtgtaagaaattgaccaattgtgacccgccatgaatgagaactaaacaaatcacagacacggccgcggcaaggttgagcacattaaccggctcggtctagtcttcacctttgaaggtgctgacacttcacgcaagccgctactcttcatggcccaccaggacgtcgtcccaatcgacgacccatcagactggactcacccgcccttcgaaggtgtctttgatggcgaatggatctggggccgcggctcaagcgactgcaaaaacgtccttatcgggttattgtctgtagtcgaagacctgctctcccaggactggaaaccaaagcgcacggtgctgtttgcctttgggtatgacgaggaatcacacggcttcctaggtgccggggcaatctccgcagctctggagaaaaagtacggcaaagactctttcgaatttatccttgacgagggtggaatgggactgcagagcctgggcgatgagtccgacgccaacggcgagatcttgtatgctctgcctgctgtcggtgagaagggcagtctcgacctcattatcaacattgccgtgcctggcggccacagttcgatcccacccgcgcacaccggcatcggcatcatggcggagattctgtacgagctcgagcgaaaggagctgttccccgcctggctggataccgaccacccggcctacgggatgctggagtgccaagcacgatactcacccgaccacgttgagccctggctatccgagaaactggcagcacatgatcctgccgctcttggcgaagctgttgccagctcccgcggtcccgcagtccggtacacaatgcagacatcgcaggccgcagacctgatccacggcggtgtcaagacaaacgcgctgccggagaagatctctgcggttgtcaactaccgcgtggcattacaccagacgcccgatgagctgcgtgagcgcgctatccgacttatcggccctatcgccaaatctcacaaccttactctacatgttgccttccccggtgtggcggagtccacagaaggagatgcgagcgaccgtactctcaagctgtcccctctgagtgttcctctttccccggctccgatctccccaacagatccgctcacatcgaaggtgtgggcgcactttgccggagtggctcgtagtgtttttgagtcgcacccgaacccacttgccaaaactgcgtctggttctaagccgacggttgttgtttcaggagatgtcatgactgggaatactgacacgcgcttctactggtctttgtcggagaatatctaccgctggagtccgtcgcgggctggcggagcgctgaatattcatactgtggatgagcggattcgcttggatgtgcatcttgaaggcatcatgctttactacggtatgttattttttcgttcgttgttccttttgggaaacttactaatttaaattagatctgattcggtcttttgatgcctgggatggagaatccgagtgaacatgcttgtccattctcagatactttgacacgtagatatgaaagtctggtatatacctcacatttttggtccagggctggatatatctcatttcgaatttagcaaatagagcaaaatcagtccaatagatcacttgttttttcacaccctctcaaaggtgccatgcagctcaaaacttcatattgggctagtcacaccgagtcaacgtaatccaagcatgaacaagatgtaattgaggatgatttgcacatttttgaagggacataaacatatagtgataactattgaatgttgatcaccttatacttcggtgtatgggataccgcagcacgtatttgttatataattgatatttcccagtgttagagcatctgaacatatctccagatgactggagagggtgtagaagtcacagattcatgtatatccatcaaatactcaaatatagtatgtgtatgcgaggatttcacaaaactcgcacaacccatgccaaaaatcaaggcaatggatgggtataagcaagaaaaagacattatcaagtgtggagtcaacgaagcgaacggaaggtatctggcacgtcttccaccacgactggtggcagctatactgggccaggacttgaagcgaaagtctttgcgagagaagaaaaaggcgaccggcggggaaaagacccgaaggcattataagtgaaataaatcaacaagaagcgaaggggtccgctagcggacgaggataggagcgaaggaaccaccgataacggggcgagcgatgaaagtaattccgggataactaggtttcatcagcaaggagcattacaggcttgagagctggttgacttactctcccgagatagtgtcgtacagatcagtcagggctcggttggtcggtgtctcattgatccaggtcgcgagatccttaatgaacatagaccgagtatcgactgaactgaccgctgccgcgaagcactcccagtcacctatcgaattgtgagtacttttctaatatggtgagccgtcagggtgtttaccttttgtgtatgtgtggcgggtatctagaggcacaccgtacttattttcaacggtcgggtagaagtcgctctgcatctgatagacagactgtggaacaaagtccaggcccagctgggcatcagcgaagatattgtagagcagacctgcagaaatggtaagcaaggcttcatagactggaagggcgctggagcttaccatggctagcggtgtcgccgtacgacaaggtggtatgtggtgggttagcatccttggcaatagccaggtcctgccactgagtgatgtagtcactggcgatgctcgagaaattagcagcgtcggcggtgtggccagtctggttggcaatgactgccatggcctgaataccgatcatgcccttgatcgcgaggttggtttggttgctaattatgccggttagttttggatttcaggaagggcagggcttactcacgctagagagccagcaaagtcgtccgtagagatctggttcgcaggataaagcgagtcctcgaccaaataactggtccactgcttgagtagagtgtagtggttattcaaaaagtcggagtcacccgacttctgcgcataagccaaagacatgatgaccatattcccgcactcttccaaaggcattttctcgtcgttgccattggggtggcccgtggcgttcggataagccgagcctaggtcgtgcatggaataattgttgggatactttccagcctcttggttttcaaacagaggagtgagcacgagtttcaggagttcggggttggtgtacaggaaaatcggataggctgggaagataacatccacagtattcatgttgccgtcggaagagatttccttcaggaacagatactgtttgtcttgtgtaccacaaagctgggtagcagcgaatgcctgccgaaccgcgagcgaagttatagtgaggtagtcctggccggctgtttcaattgaatcctgggccaccctgctatcgaaatggcttgcgagattgctcgattccgcatgatcgtggtggaagaacgaaagtgcggccaactctgtatcgaaataactcttccacaaggacggtactggggcatactgcgaagcgccttcgtactgaatagcttgatcctgtgtcagacctagtgagaagagcgtgctaatgggcgacgaatcgaccgagcccagatcgtatgagaacccgaatacgggccaggtggaggagatagctcggaaattagtgtcgacgccattggtgagttttccattgctggcaaactggccccggacgtcggtatccgcaccagactggtgggtcatgtctttcgagtcgtcggtggcccagtaccagttaccccattcgccctgctcattgttttcggaaaaggccaattgagtctgtcggtgtaccttgtggtaggccacaccgtcagtggtcccatactcccattctgcaatggcattccggtcacccgatacccattctaacatgtcgtcagcccccgcatgtaagaaaagagaccagcgcactaacctgcagagatgtccgcgtagacctgtacatcatgcgcctggccatcaagagaagagacctcgacattaagatacgagaaaacgagggactggcgcttgaagtcggtgggtgtaacaggcgacaaaaaagtaatgttcatttcaagcttattctccacgttcatagtgaagatacttttagtcgaagtatactcaaacgctgtctgattgacggttttcgacccaggaaggcccatccaagtataggtattgccatcgacgcggatcatacctgtccacccggtgacctgattcctgtatatcattagtataaaattcacatatagtcaaaaggaacttactgccaaaatacaggccattgaccagccaagtacccaccattaccaccatcactccctacatcaagccaagtgctgaggtacggtgacctaacagcgagaggtatagccgggggacgagcaggggagaaggtcgactgtgctccaatagaggacacaaaggaagcaaccagcagactgaggcggtacagctgcatgatgacagagcttgacggaagatgggatacacaaagtccaaacaagggcaagattgctctgttatttatttgcaggaaagggaaatgagctctagggagcttgactgcatagcactctggtggggccgaagaaagggatcggcttatgtttactgaagaggaatgccagtgacatttttatagtcaacctcaacccacgaagagagggggaaagccaaaggcccgtccgagacccgcatgccagaatgcgctctctacggaggaatatcaaagcggcttggtatatttgtctcaataaatacgaagtgctctaatctgctgacctccctcaaggcccgagtggaagaagattcatgctaaaggtacaaagtgacgttagggggatcaggacaggggtattcaagtggagtggctgtggaatggtggtggaaatggctcaattcaaagtcaaatccaaaaacgcggtctacatcttccggaagtaacggcataccttcacgtcgcatggaagacaagcagcggtctatgcggatcgacaaagcgatggcccagtaaacaagcgcatcggagtaatcccgacttctagttcggtgcgcgccttgcaggtgacagacttcatagcggtatggtggcgcaaataaaggtgtagaagaggactggtgagaaaaagggatgcagctgcgaaagaaacggaggtttgagggcatcgccgataggcccaggacaaataatgaggcacgagtcaagcgaattgccaagttgatgtccttcgtgatagtatcatgcggacagatcgtcggctttacttcatgcatgtaatatccgataaatctgcggggaaatggcgatcagcagcgtggcattcagcccatgagagaacagaatgaagatatttgaatagccacggtatctagaggacggaagaattcgggaagctgcagagaataatcatggcttttggtctcaaatcatatgggttccccttgcagagtctgcgtgtctctgcgtgtcagctttggcagcggcagtccgatcggagacaaaacgacttcaaatttctatcagacctagactcttgtgttgcatgaaccgtgtatgaatacagagtacatgggccgaggtcgcgtgcgcgaggtagtacaatgcatctagtttgaagctcacgatccacttcctattgaacctccttgctgcatatgtcggcatattcggttgccgacatacattttccaagacaagaacataaaccttacaattcaatagaactacgctttcggtggtctccggatattatcttcctttttgtcctccggtgaaatacttcgtgtgtcagattctagcctacgaccggccttgctactgtgccatcgctcgaagggttttattacaccccgtgatcttgcattgatgattatttacgtaagaacaacagagtgggatcgtgctccgcaagtccaagggcttctaggcaaaaggcaatgtcctcaacctccaatcctccggagtaatggtctattgtaagcgaactctcgggtttgttgtggcatgtggagttccccctatagggtttgatactcctgccgatcaagaatccaccaccccactaaattgcttgtatagcatatagcacgtctatttaatatgcttttgtacaagagaaatttactaggaaacatatatgagatgggcgatgagcattatcctacacagttgcacattggttgattacctcttcttggtcacccagattgtataactacctaactacgtacatcgggttgtgaggccctttattttgctatatcttagtagtttaccctggagctagccttccagctgtttgcacgcccatctagcctctctgagattctagccagagaaaagagaagtcagatggctgtgcaaagaattggaaggctagctccagggtaaactgctaatattacagcaaaataaagggctttataacctgatgtacggatacaatctgggttactaagaagaagaagaagagaatagatggaagatgatgatctagccactgccatgaagcttctctaaatagcttcatgtggacaaagacacaaagatctcttcctctagaatctaggagaagcatcttctgcaagatgagcaaagacagagaccgctaaaccgggtctctgcagactagataaagaagctactaacacaacaggaaatatgcaaggagagtaagagactgccaaagagaggtttgcagaactgcataggaaagagcgagcatcggacaaaaacgactctgcaatgggaaccgtttcgaggcctgtttttacaataacagcatggagaactacacatagtatagcctttttccatgctatagttacttcaagacactcgcattattactaatcatattcatcgggaagccctacctaagaagcagctacacgcaatgcacgttagatatcaggagacaatcaaaagtaaatatacaaaaccaaagccaaggatatagagagcatacacgcaacaaccaagcaaccaggtacaaagtaaaaaaaacacacgccttcagcaggatccgaaaagcacaatcaagcattccgcgccaactcaatacaaaactccccccaatcctggcccccattcagcggcagaatctcctcggcaatagcctcctccagacgctcatggtatcggcgcctgtactcattcttcacgaggtcgagatgtctaggctcccaatgcagccgcacgagacgggaaatgaggagctctgagcgctcgcggccggtccgggattcgcgcagggcctggtggaggaggagggcgtcgcgcattggtctgttgattgcgccgttgaggatgtgggctagggtttcgccctggtatttgttagtaaggattcgatttcagtattgactggaggggcaagatattaattaagtacgtaccaccagattccgcgacttcgcaatcatagccttcgcaaaattatgccggtagatatcctcgtacgagcgcagcacctcgcgcagatgcgaatcactcctcaaaacaataatatgaatcatagcagtctcgccgccctcgcggacaatcgcgcgatgcaaatcctgcacgtcggcgcgcacgagccgtctatccagtgggtcgcgatcatcctggcgctggccctcgagcgcgagcaaaatcgccatgcggaacttgtccgcgcgcagctcggagcgcatgcagcgctcgagactgttgtcgtagcggctgtcgcggaaggagtgtttgatttcgcggattgcggcgttcgtccggcccatcagggactcgattaggagttcgcggcgggatgtcccggcttggtagtagcagttcgcccagtaggcttctgattcccagcggccgagggcggtcgcgtagcagactttgccgaaggaggaactgccgagtttgaggcggaggtgtttggcgatgttgattccttttccttggaggcggacgcggtttttgtattcgtggcgcaggaggatgatttcgtcgcttgttagccggggcaggatctggatcatgggtctactgtcgatgttgcgtgtgtggctgagggcggcttgcagggcggcggcatcggggccggcgtcgtagaaggagacgcgtttccggcctgtcgttggggagacgaggactcttgcgtcggagctgcgggtggaggagcctgagtcgtggcggccgtggctgatttttgggtgggtgaggcgtttgtcgtccttgcggttgtcgcgcgaggagctgcgctctttgtctttatctttgttgccgcgggagcgggaatctttctcgctgacacggacagacgagcgcgagcgaatgtgtttgctgcgtcggcttgagtctgacgctgagtttccgtcgagtggttcaaggtctgagatttcatcgtcgcggatggaggggatgatgatcgcggatggcatcggtgagatggactggtaggttccatgatacggctccagcagcggactacccgggggatgagccgaattaggagcactggctcttccaacagcgagattattcgacgaggacacagagctgctgtgtggacgagcactcgaccgactcctgggcgcgatctccacaaactgaggctcgggctcctgtttattccgagacggctgctctggcggttgctgcgactgtccctgtgactgcggctgcgcctgcgattgatacggatacaaattctgcgacgactgcggaatcggcctagaaaactgctcatgggtagcagccgggtatataggcctaggcgcgggcggcgcgggcggcggcacaggcaccgtcttcgaagaatacttcacattaggatcaagctgcgcatactggtacacgcccggattcgcataccccacagcaggctgcgaataaccagtctcactcgagggagtacggtaatgcgaaggcgcataagccgcactcgtcggcgcatacggagcctgctgggccggtaaactagtatactgcagcgacgtagctcccgagccagcggggtagtttgacgctgcagggaacgcgccgggcatagtagtagccgggccaggctgcgaggagggcggcacaaacccagggcgttcgcattctggcactgaggcccagtctactggtgcggtagcgtaggttggttgtcgcggcgcggacgcggaggcaaactgcgtgggctgggcatagctgtatggattccggcgcgcgtagctgggatggttgcctggcgcatcgccgtaggctagatcatctgctgagtcggagtcgtggtgattcggattcggattcacatccaaacgactgtcgcgggctggcgacgggggttgacgatgcgacagtgacgaagcggcggcagaaccgcgctcctcgtctgagtgttggtagcggtcatcgcgagggtccacgtcgtagcgggcgcttcttggggcgtgcgagctgccggcgcgcgactcatctgggttctcgcgacggcgcgagctgataagcttgtattggcgctctatttcggcttcttcgtcggggctgtaggtctttgctctggggatttcgacggctggtgagcgcgaccggcgagagggggagggagagggagaggggattcggttgtcgcgcgaccgcgatcgcgaccgtgagggctcgcgggcgggagatttggatcgggtttgcgaccgtgggtcgttcacttggagggacatgtttggtgtggggttttgatcttggtatgcaatgtgtgttcaacgggtttatttattttctttttctgcgaggtcttcagtcgcataaagaagggttggactggagggtttctttgtgtgaggttcactaggccattctataattatagctatgaagcctctttgttcaggtgaattggaaagaaaagaaaggaaaggaaagataaagcgaggtttaatagccgctggcattcgacggcgccaacttacctcgagctaatctgtgacacttcaccctcatgtagcaagtattagcggctcttattggcttacagctggactgaagatcgtcgtgaccagcgcttcagccgcagacatctgaccaatgcgcatgtcagattgcaaaagaggaggtcattcatggaaggttactgtagaattacggagaattcaagataaactatcaaattaccgtgcaaacaatagatgaaaagcactagtacaggtttcggatttcgaaccgttttgtcagaagagaaaggaaagcaaaggtatgacataaaagaagccctgcgaggtgccaggccgcgaagaatgggggtatgtgcagaagagaaaactatgggaacagaagaaaggggagccgtttatcgcttgcgacggccatcgtagggtccctgacgaccaccgtagttttgcttctgggactgcgtcgtctgtccgttgcggttgagacggttggttctccagcgctcataccagaccacgcgactggcctcccgcagctcggagcgccaatcggaaaagacggagtccttcaagcggacaaagtcacagtgctcggcatcatatggatctgcgaaaccccaggggaatcggcgaccgacgggtttgtcgccagctgccagcgagtggggatccggcgacagaatcgagaagggaacgtgctggttggtggcctgcgacgcgttggaccggcgagtgctctggctgcgctgcgacggcgagccggggacattttcggctgcggtctcagactccttggcttcgctggctccattctcagtctcggttttggtctcaggctcttcttcatccgcactttccgacgacgagtattcatcttcctggtcctccaatgtcaagatctcaagggggtcgatattggcctgcttcaagctgttccagaccgccttgcggagatagctcatgtgggcggaggtaatcgtatccgccttgctgatcaccggcaccacagtggtcttgcccaacacggtgcgcaacacctggatatccaatttcttgtccagaatcccaatgacaggcgcatcggtgggcttggacgtgccattggcagcacgctccgccatggcgatgttctcatcaagacgcacaggatccagaagtaggaaagtgcagtgaatgtgggtatcacgaataccgggagaccggacaaccttcatctcctcggcgagggtctcctcaaacttgctttccaggaagcctgtcacgccgcgcagctgaagatctgcgatgttccgctccaggcctacagagtcccacagggtaagtccgacacgttctccgtcgaactccgtttccaggtattgcgacgtgaatccttcccaggctgaggtttgccgctcaagctcttcgacctcctcaggagtgcgtgaggggtgcttgtgtgcgggcatggtcagggcactgcggaggaagttgaggaatgaggttttccccgagttacgagcgccgatgacaagcacactatacaggttccattattagctggtctggttattgatgtctcttcgcgactcacttgtatggggtagggtccttgcgacggcgcacacgacgggggctgttgacggtgctgacagcactgctagcatagctgtaccgaccacggtgggtcatgctctcagagcgcgcatagggatccacggtgtttgttggcgcagccatagatggcgcgggggcttcaggctggcgtgttcgggctgcgaccttatcgcgttcctcacctccaaaagtttccagttgcggggcgggggaaagatcaggcaagcggggagggaccttaggggcataagactcgcgctgacgacgcatctcatcttccatggcttgggttttagacatcttcttgcgagctttgtcgcctaggggttcggtggatttagaacgacgaaggaagccgagggaggtgcgacggttgatgtctgtttcaggtcccaggcgcgtggaggttgccattttgggatgggcgtttgtctgttctttcctgattaggttgtttttcttttcttttcctttctcttattatttgctcttattaccaggcagtcctgaaggtatctctatcgggggatctcgatatcgcataacccaccacctgatgtcagggggaacctcgggaactgccactcaccaatagaacgagatatatcggagtccaacagcgcttatagtgcaggtcagatccgatggcgcgatttgaaactgctctgaaacagaatcagacggaatcaatccacctggtctgcggatgtatcgggtttctcaaaaacgaaggtatctgcaacagagaaaggaaagggaataagcgagagtggaatcaacacaatacaggtgcccaaccagtgggtgaaggaggggattgaaattcggccctgaacagagttcgaacttcaagctctttttttggggatgttttttttcttttggggaattgtaaataagcctgctcacagcatccagcaacagcggcgcttggagtaatgtttgaaaaggggaggagagaagagaaattcaattcacactaattctatcgggaagatcgagatgatattgaccatccgacgttcagacattcagcattcaggggtaaaaaagaccatccagagctgttccccacttgggagctttggtctctctttgttggttggagagctaaagacgggatgtatgggttcacttgtacgagtcggagtatggaggacaacatacatacagtttaagcaggttgtggaatacaacgtgggcctttagtctccacttggatattccactaaagatatacatctagacagttgatgtgttgtgttggatgtatcggatattacggagtcaacgtgtttgtctggtttgcactcgtcgattattccccagttcggtccaaccgctgctgaaactggacattgtccggagcatcgcaccaaagctaacccgtctgtctctaggccaaaagtatcggctcatctctgctggaaaagccgagaacgaacacctaatcaaactaaccgccaaactacggattagtgcgccaactaataaccataacctagcatctgcaatacgagctaggtcaaattctgaaacatgcaatttgggatatcagcccaaccacgtgacatcctgcatgttgtgacgggtggggccaccgctggacaataatgaccttcgttgaggcagttcatcaaagtctttgtatattgtatatacggagtgatacagttggaactgtgttgttccctcactgcagcatatatacagagtactccctcctcctaccctcaaaactcgcattcccctcgagaaataacggagtggagcaaaagtggggtggatttccattgcgtgcaggaactttctttttgagaagaacggtaaaaggacgcgacggagtaaagggggagtcgaattaaaattcccttcgatgctggaactgcgaactacctctgctcttatctgattgttgttcgtgagggaagccagctcaaaccaagtcgaggcgtcgcatttaatatttactgatatcaccaggagcaacaagctctaaatccgagcgtctttccactcttatcaatataccgaacctattctcatatcttatcactattgcaatatccacagcccacctctaaggctccaaccccaactttaagccgcatccacggagaaagtcctgaacggaagcacaaagcacggcttggaaggacacaccagctgtctatccaagctcttgaacctaggaccattaggaccagccacattcttggcctcaccgaagagcgtaggctcattaggcggctggtcgtcaccccatctcccattgaactccaaccacgccacgggatctttagagtccaccgcctggaacgcagctgttgttccatcataggtataagtgtatacattgagcatgggatcccacagcacgccgcggtccgtatagtccaacagaaaccctgcaggcaggttgaagcccgggaaggtgtggtcgtgttttctgtgtgtatcagtcttgccatccgccagactacagaaacttatctagacttaccctggaattgcatagtttgcatgcgtaccgactgcagagtacacatacggccgcttgtccttcttttcaacggcggcgtagctgaacgcctggccgctagcatgctgactgtaccatattgcgtcgggtgtgccgttgacgaagcggatcatgttatgttccctttattgtcagctagaacgactctacccaggcaattcttcacactaaccagtctccgatgtggtcgccaaattccaggcctaggactttgccgcctttgttgaatctggatcgatcagtataaatgtagacttaacttaggtacagtcgagcttacgcatagaagtagaagtagaacgcatcaacggttccgttgccacggtctgcgatgataaggacactcgatgtaccatcaactgttcgtccctgggcgtccggtctgatccctcggaaccaggctggctctgggttggcttcgatgccctctagagatgttaggtagacgctcgtattacccatcgaattgagcgtgtcgaggttgttaagggtcaagggtgattccactccctcgatggccctccagttgacattgggtctggtgtgatcgagctgctgttggatatcgctcggcatgtatgtttcctggctatggagccagatcaagggtgctgtagggcagaataagtaaactcagatcatcatcaataccatgtatcgcatggtttgtttaccatattctaagacatatggcgggacatcagtagccctgtcgccgagggatgcccaggccggtttggttgaagatagaccgactaccgccaacgatatgaaaagacgcatcttgtgtggcttgtcctcgagtactggagagcgacaagcgcccttttaatctctatgaggacaatcataccttgcacttacagcgatgtttaacccaaatgtttatcggcatgacctcgtcatgggcatgggattcgaggatatactacggggcgagaagcagatacgaaattcgaagtaatagaatttcataatcacaaggtcttctgctattccagcgatgctattgattcctcgaagtgtatgcgtctccttgacggggatcatgccagtgttccgagcagcggatcggagtttcaatctcagacacaagaaagtgaggccgtggacaatcccaaggtgtactcaggtggtatctctcctgcaatagggtgtgattgttgaaaagttctttgtttacctcctttatcctccggcataaagtatgcaatatgcaaccctcaggaatgtgagccttatatcaggtgcctcgtgggtgcagtacaagagtcacaatatatcttttagtgcccaggtggtcataataatagtgcgatctgcatcagatcccatggctgaatatcattgctctaaattaatgatgtcacctgcccatgaagctatcacgacgaatgttcgggcttgtatcgaatcaggttgagttacttgtaattatatgcatctgtataaaatggtgagtcccaccaataaaatcgcctacctgtaccagccgttgtacctatcttttgttttactcttcataatatcagttaccgtattcagcattccccatcgaaaccatgtatactaccaacatgtcggccacgatgagatctagtcgctcttcattatcacatgttgatcccatgaccaaaattaatagtacatactatatattgagctggactttcctctatatataattttcatttgtgcatttgtactttcttaaccgaattcatgaatccagcctctcctgcttcaactagtccttcctcagcctaaaaaccctcaaatccaacggaatccgatccccaagccaagtggcacgttgggtgtgatttcgctcatcttccgacgccacagtattagggtgaacgagagcactaagcggaccccggttaataaccagccaaggaacgaaggctccaaactgcgcaggtgtgaacagattcacttcgaacattgccaccggatgcgggccaatcggccggtcgaagaatctataaatgcgaagttcggggactgtttacgaagcataagcaagagatcaattgagatgagcaacccgaccccgaccccgcggtagacggccagacctgcagttccgttcctgggctggaagagtgcgctgcttacattctcgtctaattcgttcccagagcgctttggcgaatgcggcttggtcggggctgttctggtcgatgcgtcagtttcattgtcgcttggctttggggcccggcggcggcacctgcacttacttggaaatgatagatgtggacgtcgaagccaccttcccggcctttggagagagggtcggggaattccgagtaggctttgcttaatatgccatgttggggatttttcattgacttgccgtcttcggcgcgctcgctgcggtagatgataagtgtcttggattagatgtggttgcgggacacttactcggatagcggctcgaggttttcgtaccccgccaatggagatgggtatgagaaagcgaatgcgtctgtcattgtgagtagattgggattattgaagaagatgagaggagagcagtgggtatgtaaagatattggtgtaagtctccgtgcaggtagttatatggcgtattgacttgagttgatcagcggttgcaaatcaatgcaaagatgtctagtaagcattcaatcttagatcaaaaatgtcgtcagttagacttggagtatcatcatctgtcaagtctgcgggtgactttccgcactctgacaaagccgcggaacggacctcggtggtcaggatggtcgaggtcaactacgatgtacatcgatgtacgatgaataataaatgaaatacaattttaagtgagtatacaagatagcaagtactaactattggttttctgtcaaacagagtgcttgtttagaaacaatattggcttaatcaatacacttgggagattttacgccgttctctccacaaatatatttcagggctatgattatagaaacaacgacttattgaaagaatgtgatattgaaaatgtagctatttcgtatagcatagacaagactgcacaaaatatgaatgaaatccagactaaaaaatgaaagttacaatatacaccttggtatcacccatagcacaatcctcaaacgccgatcatcaaaacatccagtaagaaagactaccaagcagcccgaatgtcaatatggccatcgccatccacgaatttgccgcgatcccattcccgtccttcacctttcttcgaccactgtacatcctctggtttgctttctccgtccacacccgcaaaagcagtgttgttcttccatttatcaatgacggcctcgtcgattcctgctgtacgtagcctctcctcgcccttactcctccagcgctcacgatcgcgcaacgcctccattgccatgtcccagtcgtcatcttttgtcataagccccgcgacaggacgacgagatgattcctggcccatggagtctaatctgttttcatctagatgcacatcggtagccgggtcgtagccgggtgcaaagtgagcatcgatattgctcatactgtgtttatagacacctcgcccgcgcgagcggataggtggctcgttttgtcgaggagggagtggtcccacaaggtcttctaggggatcggattcgttgcccaactcattttggcgtgcagttaaagtagccaacggcgacaacggcgacagccgtctatgccgcgtgctgggttcaaggcgagaacggcgggagccatgtggcgatgcatcttcccgctttggtcgtcgagatttgtacgactctggtgagcgggaacgggaaatggaccgagcagaatgtccagattgacgtttttgtcttcgatggcgatgacggtcggtacttcggtccctgcgcggagaacgacttggagacctcgagtatgaccgctcacgtcgccgcctggtgtgttccttatctccgtcccgttgatctctcatagattcgtgatccctgtggtcacgccgatgtctatcgcgggatttgtctttctctccactcccatcatactcttcgtttgcccgtcgatgcctccgcgaccggtctcgttccgccgatggggagcgacttcgagttcttttccgatgtgaccgattgcgatcttcccgatctcccctccggtggtctcttgatcctcgaactttacttcgatcatcagatcggtctgtcgaagtggggaccaaggcacctgaagcacccgatgcctgatatttcagctggcgcatacgctgtcgtgcttctctttcttctttgagcttgagagctgtgttatgactgtctgttactttgatgagatttcgtaggaagcgggtattgggttttggggcattgcttgtcggcctgcaggtgcttgtcagtttcataatcatgcaaaccgcagattatgagagaaaccaaccttgaaggcataaaagcgctcattccttgagacgcatacttgatagaactctccttagcctccttggccaggatctgcgcaacatactcgtcgtccatgatccagatgagccacagatcgtaggactctgagggtgtaaaggagtgcaccgaggaaagtgaggaattcaaagaagagcaagtatatatgctaggccatattaaaattgaacaaagaccgaatcctctttagttgaaagaaaaccaaacgaggcgaagactcaaggcgaaagcgccttcctaaagtcgtctgaccgcctttgataaggctgtttactgtcccgcaaatgttatgcccgcagtggactcggcccctctaagctctctacattcgcaaatctcgtcggcttctcttgtcagaggcagattttcgatgataaagccctacaatatgacaaactcatcaactgaagcgcttgcagcccttcagcagctggaggagaatggcaatttgaaggaccgactcgcgattattcgcatcagcgagccaatttccaccgaagttggggggtcttacccatctccttcaaaaagaacctctgatgtttccgtgtcaaatttcgacgatcctactcctgcctcattggaggctgatcttgcacattacaaggtccgcgatgagcccgaatgcccgctatccagaccagcaaatactgatgttcgcataggaactattctccaaactgcgattctcctatctcgagcaagtaacgaaagaaaaattcttgcgcgccattgttggcgacccgcctatggttgtcggacacaatgagaacatggaactggagacgcaactagcggacgtgaaagcccagctcaaggcccaaaaagaagacgcacggattatgattgaggaaatggagctgatgggccgtgatttggcaagccgtgagtagtcaatcaccgtggaatttcaacatgttgactgaagcgtccgcggctatgacaggttacaaaaatgtcgaacttcaaactacgcagctctcaaccctgcctgcttcaatcgagaatctcgagtccaccatcgccgagctgcgtgcaaagcagatagccaccatggatccttccgatacgaatacttcctcctcgcagaaccttcctcttcccgcgaccttggcactgttagcagaacgcgaagcggaactggcagcattgaaccgccagctagccgctgtacataacacattgcctcggaagactcgagaggccgaggctgtagagagagagtgcagcgtgctcgagcgacggaagtcagatgcgatcgcgcaagcccgtgaagcccaacgcaagaagcaacagggcgaaagtgatggactcgaagagatgggacgttggtacaggggggcagaagagaccttgaaagaattggtagggacccaggcatgataacctgcaggccaagcctaggcttgtgtacgatgacatgagggacgaacgattgaacttatattaggtggggactggcgtttaagatctactatgcatatatgggtccgtggatattataattccaggttaagaaagtatggtaatggtatcattaaatcgggttccaaattgaagccttgcggctgttttagattcattgtattgcatgatcgtagaacatgagacgctatgcagtcattttgaacctccatggtatgaaggcgccccaagcgaaacccgaccgtactccattttttggggaatattgggaataatttattcctcctcctcctcctcggcgtcctcaccaccagcggcagcggcggccttcttgcggcgaacacggccgggacggccaccaccgaagggcgaggtgagggagaagtcgatgtgcttctgggagtcgagacggaccatgaacgagggaacgttgacgatctgcttgccgacgcggatgtgacgctgcttgatcaggacacgggcgtggtggatggacttggcgaggccgagcttgtagacgcaggtctggagacggcgctcgaggaaatcgtcggccttgagagccaggacgtaatcgagcttcatgcgggcctcatcgagcacaccgatgcggacaagacggcgaatgagggcattgccttcgaagagacgcttggggtccttctcgtcgagagtaaggagctcactgtggggaagatgaaaaattagcgctatgtccaccaaattcgatttgcctaggcccgatcgctcgaaacctcgcaaaatcgcagattgttccttgcacataccgagcagcacgacggatcttggagagggtgagctggacacgccacacctcgcgcttgttgcgcaggccgtactcgccgacagtcttgagttcagcatcactagtaaaaaatgttaggaatatgaacacgacataaccagaagcacgcttctggttagtggccggagagtactaacagacgagccgactcgaaggctatgatggagttagcatttagatattcaaatcgatcatgttgctgggacttcacttacgacgacgggggaccttgtaggtcttggaggaaacgcgactgcacagaaatcgattagaacggtgtgatgccttcaatttcgttgatatactcacggggccatggctgcggttagatgggcggaggttgtcgacaggaggtcgaaggatcaaatgaattgagaatttgagtgtgtgtgatgcgagccctaccctagtcctaattgggaaatataattatgtcagctgattatgtcattgagcctctccaggtccatgcccaggtccaccttctcttttcagcaacattcggaatagccggcccttcaatcgcctgaaatggatgcttgtatgcattctttttttggatatatttgtctggattacttggttttactattacagctatttgtcttaaagaacgtcaaattcgggacattttatgcatcgctgtgactcgggatctttcttgatgttgcaggcagatcgaaaactggcattatgctttcttgcgccatagcaagtaggcgaaggcgatatgagcccaaaatacttgggttgttgatattcatggcagtgagtcgctagagtctgaattctggaactggctgctggctgctggcttctagatagctgacatcgtgattccggtgcgtgaggatgatattgttgttgccattacagttcactacactgcatccccaattgaggcgtccaggatataagtgtattatattggaagatccccttgagacctgccaagcaaaatcgatggtgtagtcaagaacaccaatagtatctcccccaaacgttaccacctgcgcgctttgtttttgtctggtgagtcagtcactatacaagatactatatgactgaacgagataaattcagaaaggaattaaaaaaatccggcagtttctgaagcattggcatgaggagaagaaaagcattgcatgtttagtatttacaaatctcgaagtcaagaggaaaactcaggctttgattggccggaggctgattattgcgctaacccaaattcagaaaaatatttaataatccaaaagtggcgtagcgtggatttagcgagagtagacatgattatgtcatgtcaatcccacaaattgttatccgacactctagtttttcgtgttgaaggccccgtcgacagttaaccaccagcaccaaccacaacaccgccgtcatgcctcactcgtacggtctgcgcgccggcactcgggtacgttctgattctatttgcgacacgcgtctttttcatactgggaggacgacctggatcaactggatatgcctgagggaggataagtgctaacgaaacgacgaacagtatgccttcgcccgtggcttcaaggaggccggtatgatccgtctctctacctacctgaagacctaccggtatgctcaaaaccctcgaatatcgaattcacgacaagaatggaaatctgacggatatttttagtgttggtgatattgtcgacctcaaggtcaacggtgccgtccagaaggggtcagtacaattccaaaattccttcctgcgctctcgcccgaccgtccaatgcgatcatccaccatgagcagcgcgaaacccggaaaagaggacgagaatctaacagttgaacagtatgccccacaaggtctaccacggtaagaccggtgtcgtctacaacgtcaccaagtccgccgtcggtgtcatcctctacaagaaggtcgacaaccgctacctcgagaagcgtatcagcgtccgcattgagcacgtccagcactcccgctcccgcgaggacttcatcaagcgtgtcaaggagaacgccatcaagaagcgcgaggccaaggagaagggtgtccacgtccacttgaagcgtcaggccgttggcccccgtgaggcccacttcgtcaagcaggctgacaacaagcccgagaccgtcgtccccattgcctacgatacccacatttaaagggctcgctatcgaattgggacggtgtgtgcggttgttaggtgtttactgggttttcactccatttttgcctagactgaaatggactttgatacatgagacgaagcgcaaagggtttcggatgccctggcacatctctcgcctgtgcatagattcccctgaatgaaacaaaatcaaaaaatttccgagttcatgtctacatctttcccggtccagcataacttatatttggtgtattgttctaggcctgtgctgtagtgctattcgttctcgctctcggccttgatcgtcagccccatctgagatcagtgtactcagatcaagtatggttcgaactttgagtcataaattataatcgcttactagatctaaatgttattgcgatgatcattgatactatgctgtggcgcgggtggctttacgagtgtggcagagcgaaagggatgatcatgacatagatgcactgccaccgcgacacaagctctctcaagctactccgtatagcttcaaccaacatccgaatccgcacaagttgggcattgtcgccctctaggccacccaggtgccatacctaggctaatgaatgacctgaaccgactcacccatttaccccgattctcctgctttcgtcgaacgcccaatccccctaccttggcatcatataggtgaagtacccgatctcaagcaccagctaccggccgacatttcgcaagtcaaccgtattccgcagaccgcctctttcagctgtggttggctactctatcctgttctagacgattgactatcgcttgcccctacccaagggagaagctccacattcgatttgaatttgtccatgttgctcactctaaacttcaggcaagcacttttacccggtagcgcgggctacggatgaatgaatttcttgttgatgggctaagtttatgttgcattgtgagcgaacacctgaagcgagtgaaccgaattcctctagcactttatgtacccgattgtattaatcttgtggtatgtctaacacggaaaggttctagaagtttatctgttcgatatgttgtcgaatacacgaatacccctttgtgtttcagaccgaccatgcagtggaggtttcaagagttcatgttcgcatgtgaccgtaagtagagagcatgagggtataagcttattattacattcaatcggtctagattgatctttgtggtttggctaaaatatggttcctacgtaatggcttagatcgaagcatcttggataatgagggtctaaagttgggtacacagccacatgcaaagtccatagatcacgacacatgacgacattcggcgataactggatgtacgaaggtggagattcaggaacaatgaatacatgtaccttctgtcgattatcaagggcggtatgattgctggacagatgacctttgtctgatgcatgtcccttccctgtacggcatgcgatgaccagccactcccccgggttttacgcctcaggtcatttagaccaaaatcggagtttctgctgtgagtaggcccggatgccagactgaacaggctactagctgtcaagctcctatttaaatttagcgccggtcagcactataactactgagtttctgaaaaaaattgttaaatgcgcctgggttaaaaagctctgggtatacaaaacctggcaactcaatggatctccagccttccccaacaacaccgctgccactctgctcacccgggctatcttcgtgggcaatgagatagtcaaggcatgaactcatttggcttataactcctgcttccccccttcctagaagtcatcaatccgcactcttcagaatcatagctcgtaccttggctatttctgcaggaatctgcaccgctctcttgcaataccgttgagtagcttttctagctacgaagaaatccattttattccctcctctgtcaaaggccgtgttcgccaccgctttcgactaatttccgtggagatgggctctaataataagtaagccggctagtttgcccaggtgataatatatatgaactcccctgcgatacacccaattcaattcagttgtcattggtgatatctcactaagaatctgtctgacttttcgatttatctgttccatccgctaaccttgaccttctctcagagtctcgtcatccgacctccccgcgactaaagaccccggtaccactagcaaagacacaacatccttcggtcaagataacacctcgaagaagtctgcatccgcctccaatggcaagtcgaaaaaggggacctcatacatgctagagtcgtgggagaaggcaaccccctcgtcggagccgtggtcatcaaccaaagccacctactcgccaaagcgctaggctttggccactgttgttcattgaaattggagcttggagattgtaccagatcattgtgtaaaggattccgggggacatcggggcttggttcatctttttggtttggggtgctatttattggaaaggaaagacttgggagttatctagtcatttaactacggagtacggagtgaattaaatgagataatgatcgtcctagtgcatatcaatctaccaagtacatatgtagttacaacactgtggacgaacggcttgcatggagtggggctctggagctgtcttgctgatcatcacttgatgaatctttttttggcccttctctttggtgtcgttgtctgttttcctcttgcgggtacatatatatacttggatttgcattccttttatttccatttcacttcctcgatctagacaaggcaattgtagtcgggtactattgtgttacattgaagaatgagattcctttacatccatccacgatatctcaaccaaagcaagttgcagtgtcgttcaatcttgcattgaaactttggatgagccatggtagagatgctgtacaaccccacttggatccaaatccagtaactctaccgccgggagtacagctcgcatcactgcgaacccttttcttttttttctctccctctccacccggatttatgcatgattatttttatctaaagaataagtatcaatatccatccctcccaggcttttgaataagccgacaaccaccgatatgaagatcaatgtctgaatggggatgggggataggcgagtatcaccacaatcgcccaacttttgaaaagtatactcgtgcattattgttggccggggataagactgtttggtccaaaatgggcagcggttgagcttgccgttctagactcatcttaatcagtcaaagcgcttacatccgagtcgtctggaaaggaaattattgatttatcccgcagcagtagtgctgatgctgatcctgggattaataggccttttctcccaaccaccctggcagagctgcgcgtaaatgatgaaaaacagccatccaattcgctatatcctgccttcccaatccccgtattatgcaccttccccgctcttgccaatcaaatgtgagcattgtacggagtaatatactccgcacaagacagaagcaatgcacaacgcacggacttgaccattgaggagagctctcccatttcaacattcgctcagctggcagccgcatgaggtttctcaacacgatcgacgttagttttccgcctggcactcccgacaatggtcaagtccgtgtgctgttggatccatactgcattgcttctatcttgtgcggagtatgtatgtccggagtatggccagatactttggattcggccgatgattgccgtgtgttcgtattaatttctcgaatattattttcggccatcctattgcatttcctgcctgctccgtccaagcttctcggagatcgaatcgatacatccggagacattaaccgtttggaaataaccattccaacctttttttttcaactccaagtacccgatggcggtgggtttatacccaactggtcagctatatcgggtgagatgtgactgcatgattattactactccttacaacagttctaccgcataggtttctacatgttttcacacctaagaactggtgtagtgagggttttaagcatgtacaatagattgattgatctatacgatcttcttttcttcctcagcccccaaacctccttcgaatgtccgaactacaccacaggaaggatccaatgagttagaacggcctaagcgcccgcgattctaaagagcctttggactgcatgaaacctatcattcgttgccctagttttgtttgttgcatcccgaggggaggcactgcctcactgcttgtaatccactttgaccggtaaatcccctgctcggttgtcgactctcttattccaaaatgtctctttgccaatttggcgttgggctttgattgttcttttctttccaatctcgttctacataattatttaattggtactggctctggcactggcactggcacccgggtgcgagcgggcgtagagtagccacttctacgtacttaaggtcttcttttctcgtctcttacccttctcgtctccccttcgcgtctccccttcgcgtctccccttctcgtctccccttctcgtcgatgagacctactcttttgactaagcttcaaacaccattttctctgcttaatattattcgccttcccaaagaggtctatctatccgctatggactccactctcaataatgaggaggacgatgagatgatacattgtcctggaccttctggctcctttgcctcttcggaggagtttactggtatagataatgatatagtgagttttcatccagagatcctagcttcagggtcctaatgcttgactagtattatggatattgtgcttcaggagcctactcttctgctgatgtgacgagcttcccgaatacggatgccttccaggactctggatggatcaacaccaagcctattagtcaaattccagaacccccacagcaatacgaaaatgatctggcgtacatcaacccgggatatcccctgggggatgacaatatcccccaaagcctagaaggtgatctaggaatttcaattatcactcaacgaccagctcatccctcgggaaatcttgatcggaccacgattggaataccaaatcccacgcccttctctctgcaaccttcatctgaaccacctgccggcgtcatggaacaggttaacagcacctggagagctctcagatccaaccagcaatgtagttctgatcaagtctctcaaagcatgcagaacctcgaaacgatcaaaaccttctttcagtcaaagctcccggaacctcctgctgcatcaaccgagtactcgtcggaacaagaaaaagaaatgtatcgatgttgggtatgcgatcctcagacagctagagcaacctttccaacttttggtaccctgaagagacatttggctcagcatagtatatgcgattgcgagtggtcctgtaccgagtgccccaaagtcctccagcggcgggatagaatgcgtgatcatcttatgcacatacacaaaaaatccgatctgctcccggctgaagtggaggcaactggaatgagacgtccatacccaactcactgccccctttgcccggttgagacatcttcttggcttgtctattttgatcacgtcaagcgtcactgtcttatttcccctggttcaaagaagtcctctaccaacggcggtcgatctcgtcgcggcaacaatggtggcgggaatggcgggaacgctaatggcaatggccatagccagagcttttcttcagccgggccaagcaattcaaacggaggctcgcagtctaaacaatcaaatattaggactgggggaatccattcgcactctgtttctgataatcggctcaacagcagccattgtcaaagcgtcattgatgccattgaacaaattcctaagggatcatctcgcgagtccagggctcacctccctggagaagacagtgcgatgcccaataacccccaaccctcacaaactcccgggttgccacgaaccgatcattcgaccaagcgcaagcgcccggacgaaaatgaagagaatctccttgattcagagaaatgcagatggtgcgatcatcacatggcaaaatgtcgacaatgccaacctgacctttgccacaagtgtggtgacctgccccggagtgctattcaaattggggcttcctcgacaacgcctgtgcaagacctcccagatacatcttctaccatcatccacttggacgaaccttactttaacgctggagcattggcaaactctgggctacctcagactatgcccacccaactgtttgacatacagttcttggacccacgatcattggacatgaccaacaccttcacgaacgatctttcccaaaacaatccgtttatcggggttgtaatggattcagaaagtcatccacctctgagtgatctcagcaacaaggtccaaaagtcgcctatttttgaaagcgataccacgttacttagcagcattggacttggcacattgattgacccgttcttcgtcagaagacagaccaagcaaccaaaagcgaaagcatccggaggtcagaatctaggcttatacaaagatcttgttctcaaaaacactccttcgcccattctggaacctcttcaactggtgtctcgttgcaaatgcgcatgtgtgaccccaactgtcgactacgaagcccacgaaagcctcaaattatcgtcgaacaagcgcatcgagatgacactaacaatgtctcgtgcgcaaaaatcgggtcatcgtctccacactcgagtgcgactcttcgtgaggctctttactatccacgcatctgcagcagcaaagtcagacacccagaagcagaggactcactctattgcacccgaaattaccgacgaggatgctgagtctgataccgattcagagcaagagctcactccctcgtcgccgtccggatccgagctcactctacgcctctaccagaccgaggacatgcaaaactggtcattcagctttgacgtcaagtgggccttgacgaaactcgcccagtggaccagcggcatagatgccgatacgtaccagaagctcctactatctgatccccgctatatactggacttgatatcgaaggatattatgtataagattttttgcttgttgatgggtcacaatgggctccttctgttctatacctcattcatacgcacgtcctgatggtcatatgctctacgattttttctggtttgccaaatatcttccatactcctcctgtctttcttttctattaattctccgcgctagatatccagatcctcctgtgcaagtctgcattcaacttccaggagatgcataatgtcctcatgtgtttaatagggggggcatactacttacatgacttttcatgaatcacgagattggacttgaaatgaaatatgattcatgcgctgtaaaagcccttctcagtctcggttttagacatctccaactataccccttttcaagaagcggtctgcgccttatcgaatgtagcgttaattaccagctttacttgcactgccaccgtcaaccgtctatacaatattgtgccgtctgccttgggtaatgcatgaaaaggacaagctccctatatgagctagggtgtaccttgcttctttttgataggagatgttttgatcgcgtgtttgatgcaggggtattgcattgcatagcagcgcatgtagcttgagcacaggtgcactagctattgcggacatgtgaaaggtcttgtatatcgaccgcgtctcaagtgacggctgagtaacgtgaaagtgacgtaagagtattacatctcactctgcgcgtactgtccgagttatgtaattatatggatgtacgagtacacgctgtctagaagacgtacatgtggaaaatggaataaaaaaaaagatatcctttgctaatacgccgttgaattaaagggaggaaagcgaatgccaaacagatccaggactagtaagatgatcctgtgagaccatcttcagtagttcggcgtttcttccattcccttctcccgatttcatcattccagctggacattaaaaagcaaccatgaaaaaatttgaaaaatcaatccctcactctgaagaaacctcaccacgcgcaaagaccatcgggtctgtagcaacagactctagggacaccacgaggccaaatgacgtgtggttcccgagcaacatgacgttgggattcttagtcttggcggctacgcttcgcgccgtgggggttccaagaacctgcgtcggcgccaccagcctggttgttggggttagggttgtagtagccctgattgaatccggggttggggccctggaaaccttgttgtcctggagattgtcagtattgaggaacggaaagaacgatcagtgtgtatgccaaaatcacttaccttgcattggcatgttgcctcccatgccaccgggcatgccgccacccatcatgggattcataccagccatcgggttcatgcccatgccacccatggggggagtcataccaggcatacccatcatcggagcaccgcccatgtttccaccacgaccgccacgcataccagcaccgccgcgcatgccacccatcatgttgccgcgattgttaaatccgtagttctgcatgccccccatcggggcgccctggaagccacccatcatggggttgggcgcggcaccttggaatccacccatgggattgaagttgttgcggttattgaagttgttgttcatgttaccgcccatgccgcggttgccgaagccgcctcggccgccgcggaatccgccagtgtggttgttcatgccgtagttggggttgccattagggttgtggacagcaccaccgccgcgaccgccggcattgcgcatcggggtatccttggggagggtcttgaagggattctggtgagggctggtgtagtgaacggtgtacttgcgcttgggggtattttgtctctcaatgttgtgcttagttgcagtcgccgcctgagccgtggtgaactcaacaaatgcttgactgtgagaacgttagtatcaatgctcggcatcgtatttgttcacaaccaagtctgtgatgttcttaccccttgctcttgccgttcaccttgtgctcgctgaaggtcacatccttcagctggccctcaactccgacctgattcgaccagcttcggacttcgtcctcagttgtccaccaggtcaattcagaaatcagcaacgcagtggtggcatcgggatccacggattgatcatcgtattccttgcgcttgattccctgggggggagcaggcagaccgtggttgagtgcgggctgctgaggtgctggctgagctccattgttgttcgccgggttcacctgctgggtctgagcgggagcaggggtctcctgcttgacggcgttggatgatccggcgccggactcgggctggttctcgggagcatccagaacaagctcggaatcctgcttgaaatctccgggctcattggcattgtaagtgccgtcgccgtagatgtcaatgtcgaagttatcgtcgtcggtagccattgcgagctagattagtatccttcggggattggatctcgaagaaattattgaaattgcctgagtatctgaggttcgatagtacaggcccttcttcttcttgatcctttccgcttctgagcaaatcaagaaaagtgcatgtctgcaggcacaagccaccaattagcattgaaaaaacaccacgaaagaaagcgcaagtagtgcaggggtatcacgatcccgtattagcttccaacagcctgttggaagtcttcacaggtaaagcgactggaaatttggccaagcccccgaagggtaacataggaaggacagacatgaaaacaaagaggccagacaatacgtacaatccgaagcgaagcgcttccggtaggcacaagacttgcgcgagctgcagacgcggtgtacagagaatgggaatcagggttgttccacgactgttggatacaaagtaataagaggaaaaggagaagagaaggatgccacagacaggcaatgaatgtagtgacggacgggggaagagaacaggagccaaagcaaaggaaggggaagaaaactcttataggggggtataaacgcgggcgccgagaaagggatttggtcaatcacgacgtcgtgggctttctcaagttcaccaaagatcttagggccgacaatgagagctggggcgatggcgatgtaatcgcgcgcggacgacgggccagaccttgggagctggaacaactattctccattctccagtccccccggagaggccaattggtcattccggagaaaccacctgttcttcttttgtcgcgacttcattcttcttcaagttctttaatctttttcaataatccttctttttcgcaatcatgtctgagactttgcaggagcttgccgatatccctaaggacttcatccgggagggttctcaattcgttcgccgctgcaccaagcgtatgtcgatcggtcatttcgcgagctcctgacacgctgacatttccaatagccgataagcgtgaattcatcaagatcagccaggctgttggcatgggtttccttgttatggtatgtgccattgtggcaacccctggatcgcatcttaaggcggaagaactgacatcgccgatagggagccattggctactttgttaagctgagtgcgtgttagattgcggatatcagtctgcatattcattgcatgtttgttgtattaacctgcttgttacagttcacattcccgtcaaccaagtgctggtcggtggcgcttaagggagaggcactcccaggagatgttcagatccatttgataattttggggagatggaaacagttgataatgggaaaagcctgcagagagaagggaggaagagcgataagaggtggtatcaggcaaaatgcccttatgaatgacaccgctctatcaaatcgactgggcactatgacctaccacgtgggactccccaaacaaccctggactacgagctttttcacactgcaaggcattgtcccttttacgttttgaattcccgtggcgatcaccatcggccacttggcgctttttttttggcgagcgataggagacagagtatgatcgctatctatgagataccaccatttttcacatcctgtatcaataggggtccttgttttacttaatatacaccctcgaggcatttattcccatctacaatatcttatactaggcttttggacggcctgggtcatatctacagtcgtggaccagatgacatgacgtattgtattcgtcaaaagagatgtgtctactcctcctgagtagatattgtgagatatattgaacacgaacacccccagggtgtgcacgaaagccaactttgaatgcttttgaaccaaaaagacatccttcacctaccatatcgtatcttcagcttcctcatcagcccatcgacgaacaggtcgactgcgcaatggacgtcggggtcgagcgtttactgcattttcgtgaaatcggttaaactcagggatatatcgtagtctgtcatcataactcttgccaagcggtggatctccctcgtctttagtagcaccggcgttccaggaatgcacagtacaagtgccagtagacaagccccagccattccaagaagttgctgaacacagcattagcaatttctactaaaacgaacgttctgggatatagttacctgctagcattggcgcacttgggtgccagcttgcatcgcggacgcaagtcctccacagcatctccccactcatctcatacgctgtagcataggcatctggatcacgcggccgcgaattgagtgtcgcttgaccaacgtcaatggtgccggctagtgtggcatccaagttgtacacataaaccttgccatcctcactcccactgtaaacatagcgtgagtttgtgcttcccggtggcgagaagtggcagcggatcaaggttttgaggactcggtggccccgatatgtaacaacagaacagtcattcttggcatttctgcggaactggtctggatattgctcgaatcggtaatcgaagccagttgtgtagtcgacagggtcgatgttttcgatatcggcggtggtcatcatcttccgcagatcccaaagcttcatcgtttggtctttgctgtttgataagacgtatcggccgtcgcctttgctgtcaacgtacgttagaccctcggtatggcccataaaggcaccggcttcacgcccatcgcccattgaccgtcggtcccaaacccgaattgtcgtgtcgtctgatccagaatacaggatatgcggtgatgatgtgtcgccgtaacacacagcattgacatgatgttgatgtcgatctcggaggtttagaactggctgtcgtgtttccagatcataaacgatgaccgagtcttctgatgtgccagcgacaacctcacgtccatctccggagaatcgaagagaccagatctatcaaaaatgcactaggttagccattgaaatgacaattaaagcatcacttcacataccccgaagtgtgaactaccccaactccgtctacttcttcggcccggtggagcagaaaagtctaaaacagtaggatctgaatcatcctctgggtctgtgctggccatatatgcctgacttcgtatcgaactgtagacaaggaaacggttgtcggggcttaacgtcgcatctgtgatagtccactggccgaatggataatcgacggttttgtagtatttccagtcgtaggggttggatgtgtcgtacatccgaaccttgaagtcttgtgcgcagcagaaaaagaaattgccatcatccgagaattggcctgaataacttcgtgtgtcatagtgaatgatcatgtccgcaatcgaacttggaatgaggccctattaggcgtcaaacgtatgcgttagccccgcagactgttttatgatacatgtgccgactaagttggcctacctgagaaatagactggttggctcttttctggactccatcagtatcaatgcctagttctcgccacattaggcttgtcgcgagagatttcttgcgctgtctgaggcggtcgacataaaattgatcagttccgaaatgaccttcgctcatcaacttcttgccctccgggttaggaaccggtggcagtttaagagtttcggcggatcgtctggctcggaggcgatttcggaacatgggcaggaaatcgtcatcgcctacaaaatcatcttcttcatcttccatctggtcttgctcttcttccatagcgcttggccaaccattggcttggaggatatgttgtaagccactggatgcaagtaactcgaataatcgggaagccggtactgtaatttgtgagaaattgtactgataccctttgagaatttccagcacaacgtactacgagtgcgcccctcattcaggttgcctgtgtcctcgctctccgaatcgtccgctgtaagttcgatttggatgttttcgaggttgatgtggttatagcctatcacagggaagcggttagtccatttgtatagtattttgaggacatatatttcagtcctaccacttgccccctccgatctcatttgctgatcattgagtgtgtcgtcctcccatgcgccatcgtcctgggatggctctagcgcggggtggtagtcgggatccagctcgtcgtcttccagccattcgtgggcaggatgccagatcccttctgggccccttggagattctctcccattatcaggtgtccttgaactcatagttgtgtgtatgcggtagtgatagatgaggagatatggtgcttatcgatacatagatgataagtcccgacctcggtcacgggcgctggctttgggttatgtcattcaccctaactccgaggctaaacgccgatgacggcttgcacttcctttgtatctcaggacttataccttctagattggtatataaatttgcctcttggtttcatgcactccagtctgtggcttgtttcgagcaagcatagtactcaatttgacctttaaaaaccaaaatgggcatattatatgcaaagaagcagaagcccatggtgactgcatctctagctttgcatatgcgtgttatacagtaatcatatgtcaacgaaagcaccatcccaaaccccttataataatactgaaggagtttagacctctccattacaagatattgaagctccctctcgatatctgaatacaaaagaaacaaatactcaaggactggcacgtaacattttgtacatcttctctataaagctacagccgtatcatcaagcaatttaaagtagtcctctaagcaagcatataagggaataacttaaggataatgctagcaatatttaccttgattatgacactagcaaggatatccatgtcagttatcctaaaaacctcatgcgcttccaactcacttccaacttacttgtcgcttctaattcactcaaattcgcttctgaagcttgtttacttccaaaccgtagtagagaactgggttgccactcaagatgtgtcatcttagcgtcgaaaagaaggcaataaatgaagtagtctgatgttaaaaaagtatgatttacatatccctttgagcagttgcctgtgctctttcctactccctactatactacaccaccctatcacagacagtcgttttcgcccttctatccccgtccccatctcagccatccctgtagggaacatatacaccaaccatatcaaccactaatgtggatggcaagaaaagaccagcccttgaggaggattcagaaaaattcaatgactaatccgaatcccaagtggacaagaaatggtaggtccatcttgcatctcccttagtgaagattcaactaatccgcctatactatagagtcctactcagattgaataccacagtaccttcgagaataaagagaacaccctcgacgcctgtgtgggaaaaatagtcagcgaggcgccatctctatgctatgatactgagcagaaagaagcgttgcgtggatatcagaagcattgcactggcataatttcttttttggatgtcttcttattaagtttaagtatacgaagaagttaggttgaaggctacagattaatagcatgaaacagcttcatagtaacagactaggtgacctctaaataggtattctgattgagaatcgcggccagcagtggacatatggagtgtgtcgctgtgtaaatagtgtgtccgtagtccttgtttttgatgattgcattgaaggcaagtaatcctttacgcccaagacttcaacacgatgttaatttcagctcccctcgacgccaatagatcagacaaattaattcaaatccagcgcccatatactcccgaaccccgtgctggatggaggactagcagctgtgttctcggtcattgacggacatcaaatacagatagcaacctaggtctatattcataggctataactatgagcgattctcagccgcccgatgccgaaagaaaagaactcttcacgcaatgccactgcggtggagtctctttcgccattgccccacccagcgagaaattcgtcgtaagcccctaagtacgagaaagtggcttgcgagtatggatatctgcgaccgtcgattggttgctggcacacgcgtcatcagctgtcatccgttgagaatattaaacaaaaaaatcagaataagcgcggcctgacatccgatgtatgtatacatgtggctgtcaagaagataagctaaaagggcggatcaattatttccccggtctccattgatagagatgcttctccaactcccgaggctcgggttccctaggatctactctgtggtgttcaggtccaaggaactaaagtgagacaagctgtctaattgaatagtccgcactcgattcctcatccaagcattctcaatataaaagcccgctcgccttccctcaaattttccctccgcacccccccaaccccaccacgatgcagtccgtcccagaatcgcgacagcagtcgttcgaggagatctacggacctcccgagaacttcctcgagatagaagtgagttacttagcgcctaatacccaatatccactcccgaatcaatcacctaccccaataccccagagtctcgtgcccatatcttcccctaatcaagcccccatacatccccacccaaaacccgcatcaacaacccccatcgggcaccaagaacgaaaaatccagactaacaacgactgcaacaggtccgcaacccccagacccatggcacatcccgcaacatgtacacgtcgtacgagattgtgtgccggaccaacatccccgccttcaaattgaaacactccgtcgtgcgccgccgttactctgatttcgagtatttccgcgatatcctcgagcgcgaaagcacgcgtgtcacgatacccccactgccagggaaggttttcaccaaccggttcagcgacgacgtcatcgagcatcgccgcgaaggtctgcagcgcttcctccagatcgtcgccggacaccctcttctgcagacggggagtaaggtgcttgctagctacatacaaggtgggtttattctagtcacttgtgcggattgttgaacgtctgctaatctcatcttgcagatcccaactgggaccgcaatgcgtggtagatgactattgcgaccattaattcattaacgagaagcatgcctcattccctaggatgggataggccttccatttagcctcctcggactccctttttcacctttatttccagctccttcccttctccttcttctcccaatcctcacttcgcactttgatatcctgtccgcggctgacacctttcgtgattgaaaatgggtaccccgcagtgtatgctatgtgatgatcattgcttgattttttatgctcgtttgatatccgaatccaccgcttctttctccccactcagatacagatacaagcaagtacaggttttatttggcttaattggacaggcgctttttcctgatttttctttttccggcaatttaccaatattgttccatatgctctcatctttcgcgatgctatctttatgcatagtgagaataccagatttgttgcatcttttgctcctcagtgtcactttgattgtcaataaattcaaatttgaaaagagaacttttactaaatagggactgtagcaaaaacaaccgtgtacatactgtgggatatagatcaacaatgaaaacagatgaggaaaaaacaagaggcgatacagtaatgctccgcagagtacccaaagcaaatcaaaatgaaatgagaaagagaagcaaaaaagccaaaattcaaatgttcataacatgcgttggcaacatagcccatccaaggcttgtcccgattaggtcaattcatcccaaatcataggagcgagggtattatcttcccacggcgtctccaccgtggaagcagcacccgccccaggtccatcatccaaagagaaagaaagcgcaccggcagcagcaggcggaagatacatcgagtgctccgaaaagctctgcggaggcggaggcaagagcgcgggatcaatctggccaagactggactgcgaaggggtagcagcgtgacgactcctcgacgccgagttgcgagaagcggtagtcgaattcggagttggagttggcgtcatggcataggccttgcttggagattgttcggtgttgacaggatgtgggcggggggtcgacgcgcctgcagccgaatcctggccctggccctggtttgggttggtaaaggcctttccattcacagagccaccatcacgataggcgtgtgggaacttggttctaaagcggtcgcggaggtctgttgctttgcggtggcttaggttcaatcgggaatcttgctggattagagtccattggaagccgtgtacggcgtagcctttgaggagggcttcgtcttcgacggctgtgaagggtcgccgagagcgacgtttagattttacgacatttgcgggaattccaagagatgcgagggttgtctgggacttgctcgcgggagcgggtgtgctatttcccgatgagggcgactgcgattgggggatgctactactcccgggatctgtgtcgggcgtggatgagacggtactcgaagtagagggtttttgtggattgggagcctggccttctgctccagagattgactcggagccttgactcgagggcattatatgggagaggtggggtttgccgggtgtttcgtcagagccctctcctttggctttgagtagggtgttagcgagagtgtcatgtagttgtttcgcagcttcattgggatcggatgtactggagtaatattagctatcctagttgacttcagaggattgaattctaattgcttaccggtacgcccatggacataatactcggaatcttcatgacgaaactttagcataataccatacagttggccaataacaagcatacctgtcttttaaatttgaggcagttcgctgattaaactccagctccggttgagcaaggatagcagtccagttgccaatcccacatttgaccacaccccgaagtaaagtagccgtttcttcttcggtccactttctcacgtttttacgggaccggccacgagttttgggagaaattggcacatcctgtccagagtgaagtggcaatgccttagtgttcttgggatcctctgctttgcgaacagccagggcaatctcatcaggatccatggggttagtactttcaacattttcatcattatcattagggtcgtcgtcttcatccacattgagagacattctgaggatatcctcgagtctagtatctcgtctttcagcagcagactgtccatctgagatcgcgacatgagcagcaactagcgtcccagggtcaacagcagcaccgcctctggagggcttagtcaaaagctgggagatattagacccagcctcaataggtggaagcaaggcggcattaggtggaggctcattcaatccattcaggatagcaaatggcccaaatggaggaggtcgctgctccttctgggcctgggggataggtaactgtagatgctcgctgaacgaatcagcctgggggtctcggcgtcgacgcttgcgaggcccttggagggcgtcgtcatcgaaggatgacgagaatggaaacttttccagggcacgaagattcacaaaagcgggaaggattggccttgggggacgttccacattcgactgcgagtctgctgacagttcggttttcctgatgcgcgcagcgttcagaaactccgtaacggtcggcaggcctgcttttgcatttgctgggatcttcccgctattgctgtttgaattggggatattattcggctcccgtgtcccactggcattgggttcgaggggcgatgggacgcttaaggttcgtgatgatactggttctcgtagaggggcgatacggagagagagttgggggagttcgcggagtattgattcatcgaggggccgcaaagcgctcgcagattccattttggtcagctctcacagaattcatctcatcctggatctgacatatcatccatctttggggggtcagatgaagctctgataagatccatgcgataacggctaggctcggggcggtgacgggcgccagtaaagtgggtccgggaggtgtctacgtcagcttccatttttgtccaattgccgagatcccctggcaagggaaacgattccctttcgaaagatatcccattggactttctttcactcattgatttgatcggattctatcatacaattgaaattctatacttgatattggtcctggtcctagaacgtgagttgtcttcctctctatggaagtagcaagtaaagctaccgggagctttgtttatgccgacgctccaagcgaattacagctaggaccaaagcacgacaattgagaagacacaagggaataacattgaacgccacaggtcctaaaaatgcccaccatctttccactatggccacacatcctctttggcgtccttgagcctatctccctgtacgaccagcccaatcctttccttgaaatgcaagaatactactgacttactatccttaatgcagggccctcggtagtgcctaccctatctacaacctccaaggctttatcgccgggcaaacccccaacatcgcagccccggccaccctgcacccaagcagcgtcgcgctcgcctaccagctcggcaatgtctactcactcctcttcctagtcggcgtgggtgtctgccatgcgacaacggaaccaagggtactccgcaactatctaatcgggctggccatcgccgacattggtcatgtctacgccacgtacttggcgatgggctgggacgcatttgcggacgttgcggcatggaacgctttgacctggggtaacatcggggtcacgatgttcttgttcgtcaataggatcgcttatttcctgggcatttttggttatgcgaaggcgccgaaggcggctgcaaagcgggactgaggtgtgacctgctcctttggttggccagaccaatatgcactcgatcattttactatatctcaaaaaagcaaagaaagttaaggcggggtctttggctttggatcgctcccctccacactccactcccttgcgtttgcgccagactgctcgtctgcgcagtttaactttagccctactctttcctgtggcggctcttcggatggaatgggtctcatctgattcgtaggttcttggccggcgcatatgggatgaacatggttgggatgtggccgggtggatatgccggtatgcttgtatttgcttgactgggttactagtggggattgtggacgagatgggctgatccgattacgttttcagctccaatgagcatccactgttaaccagctgtagatagaaccttgaatgtgggaaaaaaaagaaaattatattcatattagcataatgcaacgccggactccccggtgctgccggatgctagcatgggtatcagaatagaaatacagatcataaaatattataggaggtcgtcatctggttgtagatcacctaccccgtgggaagactgccaaggaaaccaccccatcaatgcattagctgctgaccagagaggcaagcaatcgaaacagcccaccggtcataccacctgcagccacacaagccaagcacacaccgatgtcgattgctttacttctcttgtcggacccggacccggacccgaagaggaccatagcaggccgctgatccggtggtcacatctgtgggtctattaggtgctttgcaggtagtgaaaaaccggctgaaggactgcttcgccgttttctttgtggtcgcggaggtgggggaccagccagggaatgccggggaagttctggtagtgctggcgatagacggcgaagttgtcagccgggctcatgagagagacgatttcccgtggaatcagagcctcgagcgtaatcgggtttccttggatgttgccggggcgcgatgtcaagatggtatagatgtgcaggccttttatgatagccgtgaaagagtggtaatcacgggttgctaagaggaactgttcggatgatcatacggttagagggtgacatttgggcctcggcaagtttgggagtaaggactgctcacctgtgtgcattcctgtagatatggaatcaagtctgggagtgcggcgcagcattcccagactgaaacgcttagttcgcgccactggactttcagttgttccacgatgaaatcctctgttattaggctttgctgggttaactcggcaaattggtgctcgtccaggcctctcatgctgtcggccaagtctttcggagatgtcgactggagacaatcgtctaggaaaggaagagaggtgtcaaatggggtctgccaatccatgataggagtatggatatactgtcggcgatatcggattgttaaaacagtcaacattttgagcatggcagtaagccttcctggctggtccttgaataaggcctggatagggcctgcgatgaattcgaacccagcggtgttgggctgaggcaagtcatgatttgcgccaggtcgcacagctaggaggcacttgaccaacgctcggtgtgcgaatggactgcccgaccgaagatactataaaagtcagcacaggctctatgtaatgatgagtatagctgttagaatggacgaacgtaccttttccacttcggtatacagaggaatgtcctccggatagacgcccagatgatcctggagcataatataaagagccgcatgctgctgcaggaaccattcgacgaagacagcgttatacccgagagcagcacgtacaaactcttcaaatgggatctgcctgaattgaaaatggctctcggcctcaatcgctgcagcgattgcccgcgcatctagagtagggcttgactgtggtgggagccaactccaaggcatctcctggaaaggagatatactcgaccggcgcaggatctcctccaccctctgtatatgagaaagactcccaaggagctgggactcgtagggctcggacagtgcgctcaaaaaggtttctatggtgtcgacattccgagtgcaaagcgaagaccttgggaagtttgggtcgcaaaagagtccgaactggatcacacgcttgatttcttggatgtcgaatgcccagaacaccgttgtggcttcgtcttcccaccagcgataaggaatgaaaaaggcgggaatttccaggtcgagttggaagatcgccggataagaatggccccagtccgaggcaccaattctagattgcgcagacatgttcatttccttgaatagtgaatattgcatgtccaaggtctggggaggtggtccaaagaccgattcttctgggctggtcgattgcatttatgcggtttccaacgggacagaaaagcaagaccaacacattgggcacagtacacgctggacgctcatgtaacacggcgcttgaatagagtaattacagggcagggataccctggcgagcgatgtatgccaggcgcgacgcgggagagaagggagtgagtatgggagtactcgtatgtgtacgagaaataggaaaataactaaatagcgcacagataataaacaggcgggttgctcggaaaggtgaaggtgattggttttttcactataaggccagagccgatggacttctttatccctgttactcgttccgccacgttcgacacatcacgagggttgaaaatgagggggggggaactctgggcacgttaccaacaggggcgctgatctcagttcccagctgaaaggttccttgacgggaagaatcatcgggaaaaggggggaatattgtcattgggaagtaaatagggagggggcgagttactcaattcggatcccaggaccggacctccaggggctctagatcggggataaactagtgaactccataaaaaggaatgagatctgcaagttgggcctctctgctagttaccgagattgttacatgccgaacacccgttgaccgttgggctgcagaaaggaaacgatctgggtcagttaacaatatgacaagtggatagtctcccaaaggagttgcgaagcggtcaacctacaaaggaaggaaagatttaaaccgcaaaggctaattagtcggtcaaggggggtggatacacaaagtaatcaatgtgagtacactatgggatataaatgagagaaagataatctaaaacgagcattgggccaggccctcccaatgtacaccaaatggacgctaacgtaggctaacgtagtggccgtaatcccatgtgagtggagtcttgacgatcaaagaatatttttggaattcgacaaggaatatacgaacagaacaccgaacaccttggaacgtttgcttttcatggaagtccgcgccttggtttgtccgtcaatctagggccggagtatagaccatagaagcatcacaccaagctgggcggatttccaattcaggtaatcaggaacaagtattgaactttgtgacctgaagtggcggatcttttatcattattatatcattattgccatagccttgaatagaagcgccgattaacctttcgctctcgttcaattgaaaagaagatggccttgatatcggatccttgtgagattttagcacaacatactaggtacaccgctacacactgacccctccaaggtctgacatgatagcatctgaagcccagagtattggcatatatagcattcccactgccggtggaacaatccccactagttacatcacaagcgttggttctaagcaagatagttcactaccggcaggaagtccaatgtaagaaattctacgatgggtatattctccagtccaatcagtccccaacctcaccacgtgaaatcccaagattctcagacccagttcctcggaactgggacggatctcggtagacccacgccaaagtttgtggggagtgtcttataaaatggtgatgtccctgagtttcggggttcgtgagtctatgagtttctaagtttccgagtctaacttgagatctgattgatccaaggccccatctataataattagagcatatgcagggaatgctagagcgagccactagtactaataagttctaggctcaacgttcgcatttccgagaaaccacatgactagccacatatactactccgtatagcctcctactctatgcagcatggaccgacggactctacttccgtcgcctggtatcaccaacgatatatacaagctcgcctgattgattgcacattgaacaaaagtacacatttcaagtgggtccccacttaaggagaatccacaactgcattgtcctgcatcccccagataatacattgtgcgtcttgtgtagctcagattccaaattccatgacaaatgctaacatattagccagtacagccacccagccagccacccagaatgcatcaagccaagatcccccttaccacttggttaccacctcaccttgaccatttccttgaatccacccctacaaagcccaattgatcggtctccacggtgcataaattgacgggtcaggaatccatcctacagccacatgctgtgcatatttccagctggacggcgcttggaacacggatatattatcctccgtatcctcagtggagacgatccgaacgtggcacggccgactaccaggattgagtttggatctatctgattatcctattctctcactatgataagctgccggggaaatttaacagagagaatatacttccaatgactggatgcgcgagtcatttggctatctcagcccttgctttctttccctgcgatcactcgggaggatgtggtaggtgcgtccggattgaacggaacaagcgccgattctatgaggccattgctttccctcgagccgctccaacgtaagaacagcccatccggaagagaatgggaggattcctaatccgacaccggaaatgagtgagttattcttagactctcgacccgctctcgccattccttcagagatatattcagtacaacttagggagtgtcgatatatgtatgtacctaactttctccacaaatacccctgtcaaacccaaaaaatccatgtatagatgtactaaacaaaagaccaagttctacgcacggccggtggtagggcaaatctgcgataactccacatcgctgttgcatcgcatgagctagcgccacatgcgggacacacctcgattttcatcacggagcacatagttagcacgtgcatgtcaatccccatccaagtccatgatggccctgatcgccagtactgacctttgggggtgatgctcggtctgctatcgcgcgattcgggccaataataatgcgtgagcatgcgaattgaaacaccagtcgagaagatccagacttgagttttctgatcgccatcccagtatgtaagcaatctccgcgctcgtcttacgtgtaccatgtacaccgacacgggtccgacacgggaggaccgttgcatcggataagccgaggtgcggtgatgcgctggtgctgtggattgatcgattcgggctaacggggttgcgccggagatgagtatgtaggcaatatattcctgagcgggatgatgcatgtctcagatcttcagcttgaaacggtttgggcgggttcagccgagggtttatttgtaggaaatattggtccagacgagctggattggtgcaagtaggcttctcgccgtatggcatctgcggttccgatgcattcgcatgttgactacagattacagataggaaaggaaatttacgtgtccctggatcttcatgagccatggagaaaaaaaaaaagagcagatcatccagaaataggtggaagggttgaagatccagggaataaagtaaatacggtcattaaatattcgaaagatgtaatgtcaaatggtatcatatcactcggaaacgaagcggttaacccgttcctggtttgtttgctatggttcgaacctacgagaatgcattatcaaagcccgtcaagcaagacaagacgccgtttcccagctactgtttttgtttgtttttaagctgtcagctaatccacgatatcagaagatattgtgaatttagttggcgagctcgtgggcacggcggcggtcacgctcctcagcaatggagagctagaaaagaatgttagggtaattcaaagacacacagtattagggaatataacataccttgacacccttgcccttggggagggaaacccaaggcttctcctgtccaatgacgaagacgttggactcacgggtagcgaactggttgtcaagagcatcgcgaacgtggacgatgttgaaaccaccgtcgtgacgctcacggtgagtgatgacaccaacacgacccatgttgcgaccaccagtggccatgatgacaacaccggtatcgaacttgacgaagtcaaggatcttgccagtggcaatgtcgaccttgacggtgtcgttgaccttgatggcagggtcggggtagcggatgctgtagagagcaaacgcaagttagcaaaaccatgtcctgatctaatgggatcttactgtttccattgtcctctgccgatcaaccaaagcttggtccaacgactgaatgacacggaacttgtggagtgtggaactcacgttcgcgcatcgtgcgtaaccaagaatgggatcccgcccttgccgagctgaacacgcttgaccttgcagagcttgaactcagcctcctcagcctggatgcggtggacggtgaaacggcccttggtatcgtagatgagacggaagtgctcgccggtcttctcgagggagatgacgtccatgaatccagcggggtaggtggtgtcggtgcggaccttgccgtcaaccttgaccagacgctgcatcatgatggccttgacctcgcgaccgttcagggcgtacttgagactatcagcaaagagatgttagtgattgttcgtcgcgtgccgagatattcaaggtgtcgcgtgcgtaccggttacggatgaagacaatcagaggaaggcagtcccggagcttgtgaggaccgggggaggccttgggcgcataggttccggacattttgtccaagagccagtgcgagggcgcactgaggcgcttctggtgctttccgctgcaaaagacattcttgttagtgatggtgttccatttcgagaaatttttgatcactctcgcagggactggctgaactcgtaatccggcagatagacgagaccagtgtgctgaatagtgatgtagagggcgatctcatgatacttacgggccgcgcattttgactgatttgtcgactgaaggttgggtggtcggagtgtcgaaagagaaggctcaagccgagaagtggtgatccaaatcagagaggaattcgcttagtgtgtggtgattgtgagccctattctccactccgaccaatcagactccactagtgggattttagcacttgcttatgtcatctcagttcggggccctgatccacccgtggacacgtgaatttcctctttaggaatcaagaccaatgagatctaattcatttgtacgaaaatttgtatctatttgacatgcgctgataattccacttttccgtatccaatttaaatatagcccttgataacagcaacctcagcgttgaggatggatgacccagcagctccaatgacagtgttgtgagagagggcagcgaatcggatatcaaagtgaccgcctggggcaccctcacgaactcggccaacgctcactgtgtaaccgccgcagatgttgcggtccaggcggggctggggacggtcgggctcatcgaacaccttaattgcgggctctggtgcggaaggagcacccaacttctgggcctcggacttgtactcccgcagagcctccttgacctgctcggcggttggggtctgacggtctttgaaacgcaaggaaacgaatgccatgtggccgtcagtgacaccaacacgggtgcaagtggctccgatgcgaagaccagtctgctcgtcgaagccggtggcgttggcattcaatgaacccagaatcttttgggcttcgttctcgagcttgtcctcctcgccgctgatgtaggggatgacgttgtctaggatgtccatggtgggtacaccgggatagccagctccagagacggcctgctctgtgaaaacctcgacttcctcgacagggccaaacttggcctggagagctgcgaagggaatgacgatgccaataacagcgcagttagaattgcagaccaggaagcccttcttgagaccgaagtgctcgcgctggtgaggaatcagatccagatgttgggggttcacagtgggaaccaccaaaggcaccatggggtccttgcggaagttctttgcatttgagaaaacagggatctcagccttaatgaatgccatttctgcgtgaaatgtcagtgccgggtctatttgttaaatctgatacatctgatatcacataccggtctcgccagcaacatcgctgttcagtccagagaagacaaggtcacaatccgagaaatgttcaggcttgcagtcacgcatgaccaagttgctgagtttctcagacataggagaagcctgcttccaattcacggcatccttgtacttcttgttggctgaacgctcggaagcacccacggcctgaagctcaaggaatgggtggtctgccagcagtaggatgaagcgctggcccacggagccagtggcaccgagaacacctgtaacatgttagactgaacgatgcatggaatatcttgtaaaaatttgaggccgtaccgcacttcttctttgggaatgaaggagccattttgctcttgagtttttatatgaagacggatataaatcttgcgtaagttagcaaagaaaagttccaacaagtcgaaactagcgatcaatcaaaacatatatagaagaacaagggtttcatgtcgaatcatgacctgtatgagtcaaagcgttcccagagccccgcaggcagtatatacgaggctctgccggcttcaatacctcacagaccacatggctcagagtcgcaggggattttcataataaaatcttaatatgaaacactattgtacttaccgcttaacgggtgatgtggttgaaggcttgtaacatttcactccgacagcgatatcgctctcagccaattgccttgccccgcgattagtcagcagtctacatccggacaagtgtattgctccccgattggctgagatatatgggtctttggtcaaagtttaatgtccaagggtttggcttgtttgcattctttcttcggcctgtgatatggcaaatttcttgacccctactcaacgtcttcatataagattgtatcttggtgcttgggacatattcggcatcgaatagaatgacatctttatatgctatgagtcctgggttatttcgctctctccacttgatatcgatctcatatcactataataccgattttaaagcgactttcaaagggaagtagtagtaatatgatgatgcgatgtactccgtcttgaagttcctggagcccgcctttagaggtatattcttttgtaaggtgtataatgctaagtagtaatgctaaatcacaatcaatgccctgggcccggtgtctcgtcgtcgtagtcgaagatcttgccaggattcagcagccatttcggatccaatgagcgcttgatactgcgcatgacattaattgtgtccggtccaacttcctttttcaaagatcctttcttgcccagcccaatgccgtgctcgccctgtagtaccgaattagctgatattccggtctctccgatatgaacgacttaccgtgcaagagccctccatttctagcccacgatcgaccatgtcgtacactactttctcgacccgcgccctctcggcaggatcggtgcggtcatacataatgcttgcatggaagtttccatcgccgatgtggccaaggatactggcgaaaaggcctaggtcgaccaattctttcttagagatttctggcaggggtcagtatacatgcaatgaagtcaagattgaagaggccataccaatgatatcaggaagtcgagaaatgggcacagccacatcagtcgaccagacttctgatccctccttgcgcagcgccaacatactccacagcgactgcttccgcgctgaccacaggtcatgagcttcgcggtcatcacgagcgaattcaacagactgcgcattgttattcttggcgagcttcgtcgtcagatcgatgctatccgcgacaccggcgacagttcccgagaacttgaagaacagcgtaggagagaccttccattcacggcctgttccacccgcgcgattaataacgtccatttgaacatcatccatgatctccatgcactgcacagagacacccttccgaatgacctgcatagcagtcgaggccgcatcacgaatagtcgggaacgcgacaacgccaacgcgagtctgctctgggagcggggcgagcttcaacgtagcctcagtgacgataccaagcgtaccctcagagccaacaaacatgccggtgagattgtagccggcagaagtcttgcgcggacgtctgcgtgtcttgatgatgcggccatcagccaggacgaccgtgagattgatcacccagtccttcatagtgccgtagcggacggcgttggtgccactgcagtttgtgccaaccataccgccaatcatggcagatgggcctgggtcgacagggaaaaacatgccggtatccttaatcttctcgttcagatccatccattgaatggagggctgcacgacgatgtccatgtcgtctgggtggatttccaggatcttgttcatgaaggcgaagtcgattgtcatgccgccgagcggggcggagaaattggcttctagactcgatccgcccgagtagggaatcatgggcatgcggtatttgttgcatatcttggcgatctcggagacttcttgggtggtcttagggtatgcgattgcgaccggaagacggtcagcgtttaggctagaccattctgagaagccgtgttggtggagctcgtcttgctcggtgctgattgcgtcttcgccgagctttgttcttagctcattgatggcctggagtgttgttagtttgaatggccctggactggcgcgagattacgctgttgcaactcagtgatctaccttttcaaaatcctttactgagccatattgtggcttcttggaggtctgtgccggtgtctgggtatatgaggagacgccgtagcctaaccccgcagcaaatgcggagacgagtaaagccttggcgggggtccagaagggtgagggcggagcgttcgtagatgaggaattgctctcttttgtgtgctctgttttcccagcatcggaactgtttagtctagcaccgcgagctacaatagtgcgcgagacctggggccgacaaatcgaagccggtagccctcgtgagacccggaggactggtcgcattgtggacgactagaagatattatagaattgaaccttaggagctgttgtgaaaggggaagaaagaattcgatatgcgagcatgaggtgatcagccttttgtaccttgaccttgcacctcggacttcggccgagaaaagcagttagattggtccttcataatgccataatccactataatttcactctctggccatcttctcattaccgaagatgtggagaagagccgaacgtgggggcgaataggaacaggaacggagttgcgtgcgaagtccggtgagcggtatttgccgccaaatgttctgcctgcagtataataatcgtaaagtatttatactgaatcaaaaggtgaaggaagtctaatgctccatatccattcaaatgtcctcccgagggaataatggccgaaaaaactcacaaaaaggacacgatatagacattgagcaagtaattcaaaggttttgcgctacggaacaagcaataaagtccggcggtgagacaggcggtcagtatttactatgggatcatctactccgatgattctttcttttctatagctgcacttacatacatattgtactttgcatttacggtttgatcctctttcaagagtatatgtctgtctatgtatatgtagctaataagacattgaacggagagaggtagaaaattcaaggcgccaatggttgacggggcaaccgaggggtagaacctcgtacaccaacatcaactttagaattcagatcaatcgcgtactgtccaccaaatccacgaaactaacatctatgaaaattgtgaagcaatggcagagcaactcgctcaactagtgcgcgaggtagaacgcctaatcactacgccttacgtgccttcgttacaggtaagtcggtcgagactttcattaaagtatacatgctgataatactaggatctccatgatttagtgcagcacaccaaatcttcgacaattggcacctgggcattgtgtaaacgctgccaagttggcttgttggctgatgtcctgattgaagccttatcacggtcacgcgtcgcgctgcctctgatcactgcattcggtttgtgctggcttaatggaaggcttgttggaattcgactctgacatactatagcatctacatcatcgtcttttagggatgcgctgcttgagcgacatccggtgattttggatgccttcttagaaaaggccgtggacactaatggcgatgaggtaagcttcgttcttaggagccaacaaacggtagccgaagggcgtcaactaaccagttcagtatcttccggcatgtattgcgttattctcatcgcccctgccagcgagtgttgtaccgccagctaggattgccccattcatcacgaagcttgtcagcctgatggcagcgaatttatgtgttaaaactgtagcacctcttcacgcattcatctcaggactcaaaggctcgtcaagaatcttgaatgacattccgtccgaggtcatgtccaatctccagctggagttcaccaagacactgcgcaacctcgacgatcatatgggcaacttgttgtgtctggcaacctttgcgcaaattgcgacggcactagatacaaaatctcaaaatcaacacggatcagaaacgccatggctgctgagcattaagcatttctttggccagaaacggggcctgaaaacacttgacttggtcgtattgcgtgttatactagcttgctcatccagttgtaatctgacgccgtttgaggcgactgagagtattcggctggcgatctgcatagcggacgcaattgagcctgagcagaaacaggcttggatggcaggtaataatcccaagattgctaagctgtgcgagaaggctgtcagagacgttccctatagtcaaacgcaaaccatggttagtattggctgttcccgtcgagacgaaatactaatcactcaatgataggtaattgtcttcttgcacacacttctcccggcacattcattgccatctcagctacgggaagttggcatcaaggtccttttgtccaagaatagccaacagactatggagacgatacctcatcaactgattccacgcctcgcaaagtccttagcagtaagtataggagctcctgtccgtgtacaggttttgacagctgatatcaataggaatctggggaacatgccactcgtcaacttttggccttcaccttcgatgtcttaagaggtggtaaatgcgcgggggcagagatcccaacactacacctggcaaacttggtattagctggtgtacaagaagtacataccgatatcatgctttctaatgtcaagcattccatggtccctatgagggaagtgcttagagagacggttgactactttccccgacagccaagcgaaagtcaatgcagtggtcgagcatgttgtacatccgagctatacacaaggcaaaacaggttgttcctatctctattgggactttacaacatggcatcggcccaaaatggaagcgacattatcatgaaaacattcatcagacgagtggagcaatcaatgccgagcctcgactgtgccttttcaacaacaacccccaaaaccttccgtggctctttcgccttgcgcgacagacatgagcttccgtcaactcaagtgaaccgtaattggcgctctggagttactgagctgttcatgcagaatgcccagacctctcacgacaatatgatgagaaagatcgaggatacgtgctttgacctagaacgtcgctgtcacgacgttgaaggacccctgcgagctaccgaagaagagcgggacagatatgcgagcgaaaacgagcaactgaaaaggcaaaacgaagagttcaacgagcgactcaaaagcgaaaccacagagatggaaactaagttgcggaactcacatgacagttttgttgaacttggccacgaaaacacacgccttgaacaactccttcaaggtcaatactcatataccgaggagttgactatgtcgcttaactccgcacgcgaggagcttcaatatcagcaacaaagttccgagaatgcacttcacatcgaaaaagaaaaggcccgctcaaaggaattggagatgatagctactattactggaaaggatgatcaactggaagaccttcagcaggagctgtgcagtttgcaaatgaagaatgaggagacacgccagagtctagatcaaatgtcgagcgaaaaggccactttatctcaactctctagctccctcgagcaagagcttgctagtgctagagaggcattaaagcaggccaggcttcttgttgatgagaaagaagatcaagtgaaccgcttcgtggcccaagaggaagagttgcgaaagaaattgggatctgcggaaacaactgtgagtctttctgcagtcaccaatcaatacgaattggttatactgacccttctaggttgcgcaacagaatttggaagttgagaggctatactctgaattagaagaatccgatgaaaaatcgcggagtgagattgaaaaactgaaacatgatcttgaagctggagcttctcgggccacatctgaggtatgcctacataagcgtcaaatccgtgtatatgtgaaactaatctgtgccgaatagatagcaaagcatgagacagaaaatcggcgattgcatgctgctatgcaagctgccgctcttgatgcttctagggatgtccaatcgaaagacaaacggatccaacacctggagagaaaggtaatcattaccatctttatatgcaaaatctacacactctaacgtcaaatctaggtgcaagctttacgagacgaacgtgctgccaaggcccgtgagttctcagaggcacaacaacacattggtcgattaatgggtgtaatgggcttttccgctaatgcccctgagtcaaacgcgcctgcaaaacaccagcgaactaggtcctctgtcaacgccactccagctgcaaggatccctcaacccataagcgatgatgaagatggtatacagctggcacagtcctttgaatccataacatccagctttaatggacctaccccaaaacgaccaagagggaatcgcaaatcaacaaatcagccttatgctttgaacactacaggttcaaaggcgaaaagcccgcccccggctatcgccatatctcgctctgtgagaaagccactggcagaggctgaccgcaacagcccgaccaaatcacagccaagcagtggatcgaaacgcaatcaggtggatgactctttccaggagacacaggcccaagggaaccctgaagaaaaccggcttcacgatctggacttggatatggatcttgagttttctaaagactttctcttctcaagcactgcttttactgagtcaacggatcggattgccccgtagtgagaggcttgtccgggtagcgaagttgtgtgactagccctggaggtacctatgtcttgaataattatgatatctatcgtacatgttgcctaccgatgcgttattccttagagtgtttctacgtaagcaataacctacaccacagaccataatcgcctatatggtcttagtctatttttgcaccatttagaagtctgcgttatctaccactacccaaagacaattgtttgaatttgaaacttcagggaggtctcctttgttccttattcctttctatctcggattagggtgattcatttgcttgtacccttctttttatgtgttcttcacctttgccagtattgatgtatggacatagtacactattgctttcactacctcttcagctttctaaaggtagcaaataactcattttccactagaatatcactagggcattagaaggatttgaacacgccccgtaaagtagccatgtttaactagttggactatatgttcagtgaaggtattctcagtctcatatcacttttgagaaggagaaaagagcagcaatagtctcatttgtaagtctatattaaaacatctcatcttcgcttgactgaattcaaactgaacaactggactctcaaatgccatccctgctatgtcttttatccctcattttatagtcagttctcttggctccagggccgtgacaggttaagacggtcactttttcgtataaaacttgtttccgcgcgctccagtgttctatatgaactcttaggatatcgttatttacgcgtgttaatctttcggtttccgttagtcgctcatttcattcttagtcctcctttccgtttcttatttgtcccaatccttccttccgaccttggaagggtatataacgtaccctttcttctcctcttcttcaacttcttctgcttcttcgtaacacaccctactctcttgcctgacaaccaagcgcacaatggcaggccctgatatccccgacgtgcaacccccgaggtccaacccgccagtccggggttggacgacctggagatcatggaggacctgtgcagtggacttgctgaatgtcccaagggaaatgaatacccacgacatctacgacactttcaacaagtacggcaatctgatctccattgatctctgggaggacacctcgggccggcctatttccaaggcacgcattcgtttcaagtaagcatcctgtcaatccatcatgctctttacatgctttttactgatcatctataggccacctccagatgaggatttctggagaaccggctccttcggggtgaagctacggagtggccgtgtcacagcgctagcgctgtgtgtctgctgcggtgattcgaacgggaccatccagagcccagtccgcccagatgttcagcttcccggtgaactggtgagtgcatgcatgacatgaagctatcttacaatactaatagttttttctttgaaggaactgaagaccgtacaagttgacatcggtgtcctgctaggtccatccaccatccattctatgcaaagctttaacaacctggcgtaccccagattcgttgtggatgtcatgcgcaagtgcttgtttctctacttcaaagtgggcattcgcggatcggagactgctgcagacgtcatacagcatgactatcgtgtcaaaatcacatttctccaactgtcccagatttaccaacagtacgacaaagccacgagagaacactcctttgttatcgtcctaggctccgccgccatttggcaccgaaaggccaaagagattcagtctacattgacagaaccgttgagctggagagaagaggatagttggtatcgccaaacctctgtgacacataacccgaacttgctaaagaatctccccacaaatttgaagaagacgggacatatcattgacttgggtaagtaccggtatctgttatgatattgtacgctaaccagtttttttaacaggacgatggaacgtattcaagatctcattcgcaccggatgtacatcccgatatgcgtcgtgtcgacgataccagtcactacttgatgcgcgttagagaaatcttcaaggattataacatcaacgtcaaagatggaagtcactttattgagaaagcagaccggccggtaccagtgtggcattgggttgactttttggagtccaagtctaacaaggcttccgcattgctgcaagatctaggagatcagaactatctacatcttcctttcaaggtgcggtatcaactagaggtttgcttgtcccagggatatctctctgaattcaccatgacccgcgaattcgtagagagattgaaggacctcggggatgaccaagctacaagactcttagagttcgttgcaactgagaaaaaacagtaccttgaggccatggaaatctttggtctcaaattcttcagaggagtgactgactcgaagattccgagctactgttgcttcatgcacacagcacgagtcaccccgactacaatttactacaataccccaactgtagacatctcaaatcgagtcgtccgcgaatggtctaccaaaggtgcacctgggcgctttcttcgagttcgatttacagacgaaagaaccgaaggtcgcatcaatgcttcactgagcgattccaacgatgagatctacacccgtgtcaaaaggacactggccaacggtatcactattggagaccgtcgctacgagttcctcgcatttgggaactcccaattccgcgagcatggcgcatacttctttgcaccagatgccggtatctcagcggggactatccgagcctggatgggtcaattcaaccatatccgaaatgtagccaaatacgccgcaagactagggcaatgcttttcaacaacccgagctttcaccggatcctccgttcaaactgttacatgcgatgaaattgttcgtaacgacttcacgttctcggatggtgttggaaagatttccaaattccttgcccagatggtcacatctcagcacaacattaaaaccctcacaggagaacctccttcggctttccagtttcgacttggaggggccaagggcatgcttgttatctctggagaccctctgcctcaggaggtacaccttcgaccaagtcagcaaaagttcgaaactaatcaagccggcttggagatcattcgctggtcccagtattctctcgcgactttaaatcgtcagttaattcttgtgctttctgctctgaatataccagatgaagtcttccacagtaagctcaacagcatgttgggtagcttccatcgagccatgcgcaatgattcgaaagcaattaaccttctccagaagtatgtcgacccaaaccagatgaccctcaccttggctcagatggtatctgatggcttccgacgaaatgaggagccgtttgccaataccatgctcgagctttggaagtcctggcatctgaagcatctcaaagagaaagcaaagattgccatagaccaaggagccaaccttctcggtgtcatagacgagaaaggtgttttgaagggctacttcaaaagcgcattgccgagcagaagagcctcttatgaagagagactggctgctcttcctgaaatcttcgtccagatttgccggttagatggagatggcgagtacgaagtcattgaaggtctctgcattctcgctcgaaacccttctcttcaccctggtgatattcgtgtggttcgagcagtgaaccgaccagaactgcaagcgcttcgggatgtggttgtgcttccccaaactggcgaccaggatattgcgagcatgtgctctgggggtgacctcgacggcgatgactacctcgttgtttgggaccccgatctgattcccacaaactggttcgtcgaatgcatggactacaagggttccaaagcgccagaccttgatcatgatgtgacagttgatgagatcacttcattctttgtcacctatatgaagaatgactgcctcccccgaatcgcacatgcgcacttggcttgggctgacagacttccgaggggcgtgtgggaagacaagtgcattcgtctcgcgcagcttcattccgacgcagttgactataacaagagcggtgcacatgcgagaatgacccgctctttggatcccaagttctggccccatttcatggaaaagcggttcaagagaccatccagcatttacaagtctaccaaaatcctcggtcaactgtacgatgcagtggtcactccggactttgttcccaagctagagaagcccttcgactctcgtatcctggaatccccgctggctgcagcaagtgagacctacatggaatacgcccgcgagctcaaggtggaattcgacatgaacatgcgacaaatcatggctcagtatgagatcaacaccgagtttgaggtgtggtcaacttttgtactccgccacggcttcgtgatcagagactacaagatgcaggaagacctaggtaggattgtgggtacactccgccgtggatttcgccaccagtgctatgacaaagtcggccgtcagggtggaaacattcccgccttggtcatcgccatgtatcgtgttactcaggagcaagtagccacggcgctggaggctcgacgcaaagaggcattgcagagagaggatatatccattgttgaagtgacctccaccgagctcccactcattagcttcccttggattttccccgacgtcctcggcgatgttgcgacgggccgggcgcgacaatctctagtcccagagggacaagggagcagcgattcagcaaatcctaacgatggcacaatcttcactcacaatcagatcctcaagattattgaagacatggatgaggaagtgaagctgaaggctaagaaaaacgtggagccgaaatctgaggagaataccaagccgaaggctgaggcgggctctggctccgcgccctcaaatcaagaacccattgctcgtcgacgtattgacaaatccgagcctaaccccaaccccgacgacgggaataaggaggtgtgcttcgacgaggatgatgagaaggagggaggcgtggaaatcgccgctgctgaggccggagagaagattcgaaagcaggctttgacagaggatatcgtggaaatggagggcgatgtgcagccttcagcacttgacattttgctcgacatgatgaacagctgatcgttcgctcttcgctctatgagacagaaaaaaaaaaaaaaaaaaagacggagaaaatcgaaaaaaacttacacaaaaaatgggacgcaggcgtggaattgcagaccagcgttgtaacttagttaggtgatgagctgcgagtctgcggtgcgaatgaaaccggacgctcgaatttcctccaatttttagaactaagcagcaaaataacaatagcctgtagggtatatccaggtcaaaactccaattgcttcaaagcactaccaatccaatccctcatccgccttctgttccaacaattcaacgacaggctccaacacagccttggtgtgtctccaattagcagcatctctggtcctcgagtagaagacagggcaatccaagctatcacaactaacctcatcaccaggagaaacgcccatacaagagcgacaaatagcttccagaccaacgactctcttttccgcctttcgcagccgcgaaacaacattaagcattgtaagatgcggcttctgcagacagttctcacacaccggaatagtagcattagacaatctcgaccgacaaataacacacgaagacgagcgcatataagactcaagagtcttcatgttaaccccagcagaattcgagagcgtcgatccttcaatgcgccgaatacgctgcaccttcggcatctcatcataccactgccgaacatttgcacccacaagattgaaaatcctctccagcggcggaataatgttcttcgtgatatagtactccgcatcgatctcgagatgcgcgtcatgcagaagcttctgcggcgcaacacagcggtcaataagtctcgcgccaggcgcaccggtgacaaccacgtacgggacgcgctcgccggtctgcggctcggaacgcggatcctccatcatgcgctttgtgctgatcatcgcgccggcaggcaggctgcgctcggagtacgtccccagtcggacttcgcgggcgaagcagaagtcttggatggagacgcggccttgcatgatctttgtgcattggcgctgaaagtaggattttacctgggagaggtctgcggtgcggaagagcatttttagggctttttcttcgattttttgttcggcaggtgtgccgtcgcgtcggacggtttcgatgccctttgcgtcgaattcgggctctttttgcgcccggtgctcgtatttgaagcctacgtagcgtttcttcgcgagcaggatgcacgggtgatagactttttcgaattttagtttgatcgggcgtgggttcaggtctgttactgcttcagcgatttcttcgccgatgtcgaaggcttggtcgcgtgtgcggcctttgaggtagatgaatagactatcggtgtcgccgtagacgacttccgcgccccagcgttcgattgagtggatgaaggcgatggctttttcgagggtttctcgtccggtctgtacgatgctatcggcgatctcggaacagggcattcgtccggagaatgaggcagatgtgtagccgtatgtgacgtttgcaatcagcttaagcgccagctgtctgttgttcagaagccgctgcaagaccttgtcgtctttgtctgccttcatgccgtttttgaccatcacgcgggtttcaagaatctcagaaagcatcttggccagcagcgactgacgcgcttcttgattcgcatacatcataccatttggtgcgatgttgatattgttcttcagtaactcgagcagcctgggctgtcgcttgtaatctaggaaccccatcttatctcgcccacgccagtgcattgctctgccaaggaaggttgagtagcagtagttgtacgcgatcatgacactcgggtacagtgactggaaatcaagtaccagaagtgggctagtgtagaagtcactttgtggttccatgaccaggggcaagcattctaatgcgttctgttgtccgacctgctttttgcttggtgagacgaggaggaagttctctggcttcgctattcggaacatcagagactcgactttgaactgggatccccgggaaatcacagaggcgaaatcaattcccagcaatctcgcttgctcgcttatccttgttgtcaattcatttgcctcgataatttccaaattcatttgcacacgagaggtgaaatattccactactttgaagagattgcgaggcttgccactttggtgccatcgcgtcaagtctttgggggaatagtgagggattcggcgatgcaagacatgaaagacaacgttctccatcgtgtactgtagcaggttgagctcgcttttcatggcgcgccagatgttaaatatgtgtcgcccagtgatacgaatggacgaggagtggttgaaaccccactgatctgcctctttcccaaatcgtccattggactgcgattttgtcctcgagagctcctcacatatgtcaaagtcatacttcttgcgcgctcgctcaatcacatatccccatgaagcgttgtggacctcgtagccggcgattatgtccggatcgtagtaacggacaatatctatgagtcgggttatcaggtccagttccgtgggctcacactcgacgtcaattgttaatgcctttgatattttggcttccggcctctcgccttcgccatggtaaaccatcccaacatggactcccgggagatgactattgacctcaaaatcctcgtcttcggattggatacaccagaacatgcaagtgatttcgtcctcctcggggttggccatgagtgttccgcgcgtgtttacatgcacttctaagctcattgtgctcatgtgctgagcttggtgttccacgctagtggacactgcatgctgtgagtatttgaagccatgtgcgttcttctgtgttgggccctcaatctgcgagagaaagacggatttcatcttagtaggtgtggcttgggctgcgcttagtttgaagtctttagaggcttctaactcttcaaaccactgtatgacttccgacctgcttggcgggacaggagcaaactcccagaccctggcggtacacttttctcggagttgccgatcaaccttttcttgctgatctcggtcgtgtgctgttggtatttgctcaccaaacattgcaggtgcctctgccgttgggtcgaaatttggtagatagtgaattgtgttgctccctagccgaaattctctgccgccatagtctctgggccgttcaggcacatccctttcgttcctgtaaaatgctttctggtatacaactgaaggacgcccatattcatttagtgttgaactgacttcgctagaagttgggctcgcaaatttgaagaaacgtaatgaggtgtttggtgtaaaattgaatgactgctgaatgtttttcatgttcttagcgagatgtggatctaaagagactggacccatcactgttgcagacgaatgtagctccgaagaactctgaatttcacttattccgcccgacaattccgtgccatatctagaagggagagaacttaagcgaggctggaatgactccggatcctttcttgcagaatttggctcatcttggctgtaccgcaaaatggtcgaaggatcattgggatccttgaccaccgggaatttcaggccgctagtataactatgcgcctttggacggggtgttctctgcgaggaagatgattttggttccgatgacggcgtttccgcgtaagaatccaaattgctatcaaaggagacacttttgtgtttgtcgtcttgctggtgcttccgcgtactgggtgaatccaatggcccgccaggcaagccgtgtttggtcatgtgtctagctcttttggtagacgaataatggcaatcgagggtttcaaagtgttgtcttttgggtgttacactgctgctttgactctgattcctgggccgtctttcttgggctacacaatctccttccttgtagacaccatccatagttgtttctgtgttgtcagtctcagcaggctcttcgggtgcaaccaaatctgagaagcgtatttcgtcaaagacctcatcgtaaaagctctccttcagcgtgtcttctttcatttcagtctcctgtttcgttctcccttccaatgaggacccttcttgatcagaatccgagtaataccgtccgtcaggttgagatgatagagctagactctcatcaaccgaaatttccggcaccttttgctcggctgggtcctgagaacggctggtatcaaaggtcaaagtactgattttatcaggaaagaagtcctcaacactatccaacgcagtcttcacatttttggcttgggcgtcgatattcaagaatgtcccgaatgtcgtgtctttgttgtcatcatcgcgtttctcgttagcctcaagctcagacgccatctcacggaattcttcctcgtgtatccagccagctctcgactgatttcgtggatctgcagacattgaaaccaattcctcgggtccaaacggagtgcttccggggtcagtgatacccattctcttcttgcgtctgcgagtttcgtcctgccatagtccagccatgctagggacgagccgctcgctaaccgcgacaggtttcaacagctcggtgaaatcatggtgcaaaggccgttcctttacatcaagacggttcaggatatcttgaacacaaatatcaacctccagcgcgcaattgctttgtttctgtaatgcagggtgatcgagtatgctctcgggtggaactgaacgatcgtgccagcgatgggctagattgctgagctcgagatactcgggtactggagctcggaacttgacttggctacagttcatggttgcacatccgtacaagttgtagtcgcacatccattgcgggatgtattgcatatgtgcctcgtagggctgaagtgaacgtttcataacagctccctggtgcagaagatcgaccaggcgatttgtatggaaggggtttaagagataaattttgaagaaaaaccgccatcccacatggtatccgtagaacgggactcctttcaccaaggtgatgtgcgccacaaacgctgtcctccggtcatatgcatttcggcgaaagctgaccgccagagcatgatcgattgaaagatggatagatcggattgcggagtttactacagttttggtaagttaaccctcaaatcaccaatgactattactcaccatcttctggcgccaaagacccggtgtattcgatgtaaaggtatggaaatgcgccatggacatgtacgcaaactctctggcctgtctcggtggctccaaatattcgaatcacaggcaccttgggctgaaaatctgtctccgaggcttcatcacgaaaaggtagtggaggatccaactccgacgcggtcgcctggtaatgatcgatacagttgagacgcacacggaatggctccatcgctctggtgtgtggcgaccagaagccacagcaacattgcgaaggataaataaatcacgcaccgattatcgcatgtgtgtcctctttggcatctgtaggaatatgtggttgagaaaacgcgacatagatacgtccttgacaacgcgcgataacgcctagtcacgtgtttcatatcaaatccacccgccaagctcgggcctgtcgcaacttcactcatctcatctcacaacagagagagctacaggtggcttaatctacttcctcacttgctttcctttcttcccaggtccaattttacccctcctcgttgaacataccagtcatgtcacgaaaacccgcagatgtggcgtcaaaaacgcctaacgagtacattccgtccttcatctcgaaaaagccattctacgttgacgatgagacaaacaacgattacctcgaacatcaacgtcttcagaaagccattcccgatcaatcaaaatggtatgatcgaggaaagcgtgcgggtccagcagccaccaaataccgcaaaggcgcatgtgaaaactgtggcgcgatgacacacaaaaccaaagagtgtttgagtcgaccccgcaagcaaggcgccagatggacaggaaaggatattcaggcagatgaacttctccagaaggtcgacatggggtgggacgcgaaaagagatcggtggaatggctacgatgccaccgaatatcgccaggtggtcgaggaatatgaagagatggaggccatcaagcgaatggcgaaggatgattcaaagctcaagaaacttcaagccgatgaagatggcgatgaggcccccgattcagatatccggtacgccgaagaatccgacatgggacgacaacagagtaccgcaacccgaaacctacgtattcgagaagacaccgccaaatacctgctcaacctcgaccttgattccgccaaatacgacccgaagacacgccgaatggtggatatgggcgcgcaggatgaccaggccgctgcacttgtcgcagaagagaatttcgtccgtgcttcgggcgatgctgcggaattcgagaaagcccagcaatatgcgtgggagtcacaagagaagggtctgcctcaactacatatccaagccaatccgacatctggtgaagttcttcgtaagaaggagatggctgatagtgagactaagcgcgaggcgcatcgcaaagctctcctggataaatacggtggtgcagagcactcaaaaccaagtgcgctgcgagagacgatggtggttgaaaacgagcggttcattgaatatgacgagagtggtgccatcaagggtgcgcccaagaacgcaactaaatctaagtaccccgaagacgtgatggtcaacaatcatgcctccgtcttcggcagctggtggtaccaattcaaatgggggtatgcatgctgttattccacggtgaagaacagctactgtacaggggaagatggaaagaaggctttcgaggaagaaggcaacatgttaatgatggctggagcagtcgatgataatgaagaggtttccgaagacactggaaatgcggatctctctcacgagtctgagcaggccgatggcagggatgaagagcagctttcaaatcccaatggtaaaaagcggaccctggaagaattgaagtcaggtatcacagaggaggaatttgactcatacaagcggagtcggttggctgccgaggaccctatggcgaacttcatagggaaagattgattctgatgatgttctccatatactacttgcatgggcgttcggatgtactaaaatacccttgatatgctgttgaaacagtgaacaaatgcacaacgcaataatttgtgttttaaattttttttcgtatatagttctaaaacaacctcaaaataacatgcctcaatgagatatctagaatgaacatgaatcaataggatatcctatctaccactctgtaatttgttgactttcgatatgatggttatcacgtgatttgtaatgcacggaccgtctaattccaatgagggttggtcggtcacgggatccggttaagccctgataggttcacgtgattgactaacgcactcgcttagtgcacaatcgccagatcttgggcaagtttcgagacgcttagcgacgacgacccgacaaccagccccttcaacggaattgccaggtacgtccgcatactggtcccttgactagtgttcacttcaaccgcgtcaacttactaacacatatcctcatccacagttccataattcaagatgagtacgtccgatgccgactcatcgcaccgcgatcctccgcagcgtcgaataactccaaactaacaaccgccatagctaagggtacctcaagcttcggaaagcgtcacaacaagacgcacactctgtgccgtcgttgtggtacgtattacacctatttttcgcgatttcacccatccgacccgcagtcgcaaaatttctacatcgaaagacggaattagcgattacgccgaacaacacacaatctagcaaggacaagcgctaacctgtgatatttacgactacaggcaagcggtctttccacatccagaagtcgacttgtgccaactgcggctaccctgctgccaagacccgcaagtgtacgcaaatacccctcccgagaacgttgatgatatgaatggtggccattatttggaatttgggcaccaagtcgaaaactctggcttacatacattttctacgaacagtcaactggggtgagaaggctaagcgccgcaagaccaccggctccggccgcctgcgctccctccgcgatgtccaccgccgcttcttgaacggcttccagaccggtacccccaagggtgcccgtggccccgtcaccaactagattccctttttcgtccgctcggcgtcgcgttttcgttatcggagaggctggaataggaatgaggggagggatcctggcatgacgtgaattagcattacgggatagcattactcgaaatgcaatggcagttccggactcttatcgctttcccgtggagttggtggtgtgtgcaactgtcgatcacgttggttctctttgccacgtcaaggatgacaaagtaggacttgcagacgatgggaaaagtttcgttgaggggctctttcctacggaaaagagctggattaaaaaaaccccgggaaagcgtgaatgaatttcctttttcttcgtttatggctggcgaatatcccatgtcatgacagatacaatgtgaacactcttcctaccatttcatggtctgttctactcagtacgagcctctttgaggaccagacgcagagacttgaattggacatgattcaatggctgtttctgataagctcatgattctcgtgaacatctaacccatagtatacagcctcggctcatgattctccacgaccaaacacccggacaccgccatcccgttgaatgaagtacaacgcctctctctcctcgaggttctctttttcactcgtgttcagcccaccacctcggctgattctcagtacgccgctcacatcttttgcggctccagtatccaaagtgcgcagctgcatgaccgactgagcccgatgcgccagcccaataacaagtgccgcatgttccgtctccaatggtgtagccatcttcacatccgatgtggatgcattttgtattaatggggcatctgtagctaacgttaaaaccgtagcatgtgcactctgtcgaacatagtcagcctgccgtaaactttgcctatcaagtgacaagccttacctgttgtagcgctgtgatccactccgatatctctgttgctccaatccccatactcggacctgtcgcagcaaggagcaggtcaggctggtctataatgaggagaagctcatcaccatcttccattgaacttttttgctgttcaatcactgatgagatatctttctctagtgcgtccagggaggcgagaccacggccagagaattggagcttctttgcaatcccaggttcagccttcgtcgtcacatttcctctcactcctctagctgttggcaccggctgtggtgaccttccaggtacagcaccaggcggagaccgcattgggagcgttgtgcgtggacttcccagaccagccggtgagatactgggaggagtggatgtagcttgcggtgcgtaaaacagctcagacaagccatctatgaatgcaaactgttgcttatctgccagacgcgcaaggtcgaggccctataaccttggttagtgatgtcgaacaaagtatatatcaacacataatataagaagtagaacacaaatacatgttccaattcaactatcagtaaacctgttgtctgaacttaccaatcgctttgcttcggtcctccagaattcatagctccgcatgaagctcaccagcaccactttcttcttgataccattttgcggctcgtctgagccaaatgccacattgggatttggtgcgctcagcgcagcatgaaggaatctcagaaccagccagttcgaagtcgcaccaaggatagaagagaccagcgtcagagatgaatcaggcaaatttgatacatatgaggcgaggaggggcggtagtgggggttgagagggcatggttgcgcctcgatccggatatcgatgctatcctttgttcctagcgagttgaaggtgtaccgggctaaattccaatctttcctctccaattattcagtctttgtttgaaaatgttgctgctggtcaagtcgtggagatgatgtcgagaaaaaatgtctccggcttgtgattggcccctcaggtatagccatgccaagacataggatatcgagatgatattgcatagaatttaattctcgtgctgtttctcggtttaccttctcttggatatacgggtaatacatcatatagtctagtatttaactccctaaccatttactattcaaaacctctaagttagaggttctcagaatgatgcgtacaagcaatatatatagttctagctctatactacctcaacggctacacaaaacatctaaaacctcgaccgatgtagttcataggagacaaactacaaggaaaaccatatcagagttttgaaacaacataccaaaccgtcaacaagggccgtgatcagattctgaataatctctgcctgaggcaccaatatgagttttctgcaccatcacctgaccgttttccccaccatggaggggagcgatggatgcttcttatccatcgcattgcaagaggctgtgctctagcgccgatcgtgagtacattctatattctagagatcacttccccaccgctatgtgtatgcgcaccctagccctataatgcttatgtgctatactgatacccgatgtggaggtgttctcgcgaaccattttccgctcattatatcgaatgcactagctaactgttatagatgactgccgttgtatggcatcaaagcgcattggatacaagatataatatatctaacctgcctcgataaagatggctagcacgcgtgattcgcactcatttgctgtatgtattgatcggcctgcatgatagttgagataaaaagcaagggttgaagtctgactttccacatagtgcgacgaatgccgcttgcgcaagtcaagagtaagtgccttgtattaaacccctgcaggcgccggcccatttaacccgggtattatagtgctcaaaagagcggccagtttgtctgcaatgccgacagctgaacaaagaatgtgtatacagccctaaagtcagcagaagtcctctgactcggcagtacgtgaccagaaccaaaagttggtatttagacaaggctgactgactacccagacacttaacctatgttgaagatcgcctacactcatttgaaacagccttaggaaggctgttcccgggtggtgatctggatgctacacttcgttctcttttgcaaaatccggaggtcccgagggccccttcatccaagtcctcttcgaggcactcaacccccaagcatgagccagaacgggctgaaccagcaccagaagctctcccacagcaagccgatggctttgactgggctgaaaaagaaattacgcttggtgatttgacagacggcatggctgcgctgtctattaagcccgaaggagctggctactttggttagttgaatatccattatattaacttttcatttccaactgacacagatctcaggggcgtcttcaagtgttgtaccattacgagcactttttgatcatggatttgacctgaatatacccgtccgctcggcaaggtcgggaggcgtgcctctcaaagcacagcttctggaaagtgccccatccggactgatcgaacaagcgtttatcgacgctttcttcctcaactatcataccagctatccattcatccacgagcctaccttccggatgcagtttaatgacccatccctacgcccgcatggtacggcctggcatatcctcctaaacacgatcctagctcttggagcctggtgcatcggcgatgacagctcagacctcgatatcacattctaccaagaagccagaggatacttgcagcaggcgtctgtatttgagagtggaaatctgacattagtccaaggattattgttactgagcaactatgcacagaaacggaacaagccgaataccggatggaattatcttggtctggcagttcgaatggccatgagtttaggtcttcacaaggaattccctggctggaagatcagtcttctacaaagagaaatccgcagaagattgtggtggggagttttcatcttcgacagcggcgcagccaagaccttcggaagaccgatcctcctcccagaggacagtgtcatggatgcgaagcaggttcgaaatatccacgaagaggtatttggaaccaagatataacataaaaaaagtagcaataactaataattacaggccttgactcccacaacaacaactttgccggccgaatcggccggcccaaccatctactccggcttaattgcccaggccagattccaccttctcaccaatagcgtctaccaacgccttatctccagccccagcctcaccccagaagacacactaaacctgcaaaaacccatcgaagaatggtacaacggtcttccgtcttacctcaaacacccgcagttgcctatctccatgcagccagcgaatatagacccggactccctcgcactcgtgcgcaaccgcctgctatggcgaaactggaatctcacgattctgatctacagaccaatcgtacttcgctgggccgccagacgctgggccccacatagcggcagtccaggcacaccggacgcagggtccgaagaccccttcgaaacagagtgtcgattacgctgtcttcaaaatgcgcgtctgaccatctcctccatctcggagtacatggcgaactatatgtgcaccagacttggagcttggtacatgctgtatgtattcctcaaactaataccccagtcgaacgacatctaacataaaatagctacttcctcttccaagcaggcctcatccccatagtcttcctaatgaccgacccttcaaacccagaagccgccacctggctacaggacatcgaaaccacaaaatccctcctaacccacccctccctcggcacaaaccgcttcgcaagccgctgcttcgaggtcatcaaccgattgctcggcccaccaacgcactcagtgccaaacggactcccacccgacgatggccagctcgactcccagctccagcaccagcacatgtctccgcagttgcagccgaacatgatgccattccccgggcagctcttcaatgatcctgaattcggcgggagcttgtttccggtcgagcagcatatgcaaatgcctaatacgggggtcatggatttttcggaatgggtgaatttccccgcgacggaatgaatggctgtggttttgatattgatttcttttgtttgtatgtatcttgcattgtaggatgggcatatggagaaatgggaaaagacttggaaatagttatataggtatcagcgaatactccaatacatgactttgatagtgtatctaacgtggcatcctatgtcaagagtttcatctgtcagataatgggaatgtggttttttaacatgatatgtatgtaaataagtgtttatttcttttcccgggtcgttcaataaaccgacgatccttgacagggattccccgcaatatcaaactcacccacctcgggcccaccaaactcggggaaacgctttgtcccaggctcggctttccccctttcagttggagcggagtagacctctccgttgatcttcattctatcagaccatgtgcctcgatctaagctttcggagtactgtattccttcttcatctataccccagacggagtcctgtgttcctaaacagcagagggcagttcggttacttgacttggagtcatataccacgatataaagcccagcgacaattctttctcatctgttcagaaaatattgacatattatggctactactgcagatagcaccccgaagggtggctttgcgcttgtcctacagaatccctttctctgcggtgttgcatcggtaagtgtctgctcttgacatatcgctgttcattcattgaactttgcacagttctcgaccctaggtgggctgttatttggctatgaccaaggtgtcattagtggtgttatcaccatggagtcctttggagctcgatacccccgcgtcttcgcagaaagcggtttcaagggttggttcgtgtcaaccctgttgcttgcagcttgggctggttccttgatcaacggaccgatcgccgatcgagttgggcggaagatgtctattaatctggcagtggtggtctttgtcgttggttccgttattcaatgcgctgctatgagtgtcccgatgctattcgccggtcgagctattgctggcttggctgttggtcaattgaccatggttgtgccgctgtacatttctgaggtttctattccagagattcgcggtggacttgtggttctacagcaatgtaggttgttcttgaggttgggtatggctcgtcgactaatttgtgttcagtatctgtcactctcggaatcctgtttagctactggatcgactatggaacaaactacatcggtggtgctagatgcgctcctgaaatcccgtactccggtggtacaatttcaaagcctaccttcgacccatatcatgatgtccctgctggtggctgcactgggcagtccgaggcgtcgtggcgtctccccctggccctgcagattgtcccagctgtcatcctcggtgttgggatgctgttcttcccagactcgccccgttggttgttgatgaaggagcgtgatgacgactcgttgcacgcactctcaaggctgcgccgcatggatcgcgatagtcctattctccttaacgagtatcttgaaatcaaggcctctatcatgctggaaaattcctttgcgagggacaatttccctaatctctccggatacaagttgcacgttgctcaggtttgttgccaattcaccatatgaccggtttcgctgacactttcaaaagtacatgtccttcttcacagcatggtcccgcttcaggcggttggctattggttgtatcgtgatgttcttccagcagttcatgggttgcaatggtatgcatgtcccctcatcaatctatagtagtatctaattgatatagccatgatctactacgcacctacgatcttcgcccagcttggcctggatggaaacaccacctccctccttgctactggtgtttacggcatcgtcaactgtcttagtaccctccccgcgctcttcttcatcgacaaagtcggtcgtcgacccctgctcatggcaggcgctgcgggaacttgcatctcgctggtcattgtaggcggcatcctgggtggcttcggttcctcactcgtgaataataaatctgctggttgggctggtattgcctttatctacatctacgatatcaacttctcctattccttcggtgagatcatgccttgtacttttcccccgacaaccaactgacaacatcttcacatcagcccctatcggctgggttcttccttcggaaattttcaacctttcaattagatccaaggccatatccatcacaacctcggcaacatggatgtgcaacttgtaagtagcgcgatcaatcaggtattcgattcgaatctaacaactctgtcttgcagcatcattggccttgtcacgcctgatatgctcgagtctatcacctggggcacatacatcttctttgctgccttctgtcttcttgcgcttgcattcaccttcttctgcatccccgagacccgtggaaaggtatgttctgcaaccctcttttccagagcggaccgctttgtccatggaagattgacgatgctaactatttccaacagacactcgaagatatggatctcattttcggtgacacggccgctcacgaagaaaagaagcgcatcaagcgcattgaagccgagttacgcgggacaccgattgaagaagatgatatcgtcaagccggttggttcccatgtggaactggcatgaacgccaacgtcgactcaaagagaaggttacccgtacataatgatttattcgaagcaggacgtcaattgtaatacaaggaattgagataatgcgacattggcttcatggctccttcccaaactggaagttccccgtgtaaacaaagaaggcaaacaatatgaactggaaggtggcatgtgacattgatattgacagggcaggtgtgagggacctgtcgcacttgaggaaggcacgtgggtttggggtataaaaggacccttccccccatttctcttcttctcttcttcttctctcctccccatctctctggccaccatctctccgtccaccccccctcccctccccctccccttcccctcnnnnnnnnnnnnnnnnnnnnnnnnnnnnnnnnnnnnnnnnnnnnnnnnnnnnnnnnnnnnnnnnnnnnnnnnnnnnnnnnnnnnnnnnnnnnnnnnnnnnnnnnnnnnnnnnnnnnnnnnnnnnnnnnnnnnnnnnnnnnnnnnnnnnnnnnnnnnnnnnnnnnnnnnnnnctcatgctgcttaacctaccacagggatcataacattaccatgtttgttatgaggtctatgtaggtctgcatcaaataacaaaccgagctttctcgtggaagttcctgaagtcgtggctctcattgccatttgacaagtcccacggaatacatgtagatagccatagccgagttgaactcctagacttaatcctccacgtattctaatgtctcctttgtatcacagaatcttttgtgatgaggtcctcgcagatggttctaacacgacgccctcccaaacgcgtaaacaaaggtctctgtagccttgacttggtgctggccttctgttatgtctctactatctatcacatgccaaaaacaacaatgtgaatagaccttcgatgtcagccctgtggagaatggcgtcagtttggaatttctagcctattccgatctatcaccaagaccgggacttctattccaatatttgaaaaaaggaaatgttgagaatcgatcacaagatgcctctgagcgagtactggattgggtcaatgacaacggtgatatcgactctgtgcagcccatgtgaaacccatcttcactgccaaaaccaatacaacttgcgtgattatgcgcagattctccaggggaccactcacatccagatacagccaccaaagaacagctacctatcctcgagacacacgtcagctgctagaaatggtttctcaagagccatcaggtgcaaaaggcagcatctgacctgtccagcacaatgcaataaatactcgccctgctggcatcaaaccccagatcaatcttccattcttccagatatcccaaattccaagtccaaccatgccaccctcaccctccaccctcctccacatcggcatcctcctcctcgaaacaacccaactcctcgacctatccgccatagacctcctctacatgacaacccccgaatacctaaccacctgcacccccccacttcctcaatccctaatatcaatgagccgaccctgcaaaatgcactacataaccgccaacgccgcaaacccaacgcacacaacctcccaactctcaatccaaccaacctcatccctaacctcccccgccgtggcacccggaaccctagacctagtcctcatccccggcccatcgccgaaaaccatgccgccggcaaatgaatacctggactttgtgcgcgcgcatttcgaggccggcgtgctggtgttggcggtttgtacggcggcgtttgtggttgggtatgcgggtgttgcggatgggcgtagggttacggcgccgaggttgttggttcctgagatgaggaggatgtttcctggggcggactgggatgagagggttagggttgttagggatgggaatttatggacttgtggtatgttttttctttcttttttctttctttcgggttcgggttcgggtttgagttagatgtatatacatgtatgtgcatgctaatactactaggcggaatcaccaacggtcacgatctagtcatagcctacctgcgagaccattacccagccttattagtgaatacgatccttgccgctgcggatatcactccgcgtccggtggcgtatgctacttccgcgacggaggatacggataccgtctacgtggtgtggcgggttattaaggcattttcgaaagcagtggtttggttctttagtaagaagtgagtgttgaccttctagaagtgtggtagcattccaccgacgtcatcccgagtaccccgaggcttaaaatgaggatcgaggattaaggtttcttgtttcttttgggataaattaaataaaaactaaaatgtgacatctggtagtacgtagtactactattttgttgaaacgttattctacgtgtctaaagcgaggcacacagatatggttcaatagtagtgcatttcttgcagttccaaagcctaaaaaaatggagagaagaggagaacaaaaacaaacacagaccccaaggtttgcgaaaaacgaaggaagaaaaaaaaaaccaatcaatctgggcgagaacgctcgtaccatgcaacgcgctgcaccacgctaaagaggacaatcatagagaagagaagtgaagaggggaagtgaagaagagaagcgaagggaagtaaagaagaggaggaaaatatgaagcgtgcctaccctagacccagaagggaaaaaggtaagtttcatcagaataacttgagagcgatgtgctggcctagtccctgacaacccagaactataatacgagtcgagccaattaacccagatcattaagaaaaatgagacaacgtgatccactgctcttatcatgcatgacagcccggttttatcgtcgttcatgcggttcccaatggatcggttcaaagtcggaattctggaaatgggcttggttgtacggggaactaagagaaaagttagtattagtaatgaatgtggacctgaaagtgaaacttactttttgaaaggtggcgtgactggcaacgatcggctgagattcggcttcatcaccaacgggttcaggcggatctgcgggccgtctgacgttcgactgggcaatgaagtcatcggtggcggggcggaggacggtggcgccatatgtggagcaggggagacaggaaccgacgggatgggcgcgtgggttggcataggcgattgatacatgtcttgttgcggggacatgcggaatggactggcgggagttggcgagacagaaggcattggagacatgggaccacccatcccgaaagatgcgtcctgcatcaggttgggaatggccattaagctgggattgacgtcgaatccgagagcagcctggtcccaggaggagtagtcggacgtcatcccgtattggaggttgactatgggtgccatattcaaagtttcgaccgggtaaaggatatcataatggccgctgtggatgttaaacgtggtcaacacatgctgcctagagaaactcacggtcggtataggaggcggattgttgcaccactgggattatgagaggacagttggtggggtgtcacgacgtcgccttcacttcggtcgaggtaaaggatttcgactccaaatccggagccttcgattacaccgtcgatcagtgcctgcaggccaacttcgtcgatttcggtcttaaccgggtctatccgcgagctgcagtactgattgagtgacatgggtaggaaagcctggtaccggctcgggttgagcttcatccaggcactagtcaagatctgagagaatcagtttacgtcggagggaagggaatgacgcgcatcatccgagacatactcggaagtgggtaatgatagcatcagagcagtagccctcgttaaaagcctcgacgaggaaagactcgtcccgggcgccattctggatagcagcatgggtgcggttgaggacgtcctccgtagcatcgacaaagatctcgtagatagaatccgacagaccgacccgttccaaaagcgaagtaagagccttcattctctggatctcggtttcaatacggagcgtgtctctgagggtgaagagggtctcgaaataaccaaatgccacagctgtaaggattagcgaagatacacatgatatcgcatataaccatacctctccaaccacaattcccgtcgcctttcatgatccggcattcgggatgggtgatagaaagcgcctgggcaagttagacgagacatggtaacggctcaactcaagcttacattcgtctttgtagctagagtaggatccgcattcgagtaatccaaggcgatgctgtggctagactgttttattgagacaaggggaccctgtcgacacggtatcagccagggctgcagaggatagtcgaaaccaattacctggacttcgggctggtagttgttggacagcttctggaagcgctccatctcgtcggcggagagcgcattcatattggcggggtgagaggagactggatgggagaaagcagttgacagtgaaagcgctacaggcgagagaaacgacgagggaagggcgtcccggtaaaaattgacgggattctgcttttccgggaacggctggtgaataccgaaatgattccaggtaggttttgataacatcgcatacggtggagttgtgcttattcgagtcgaagagtgcgcagttatgccaatgttgtctgagggtgttagatgacagagaataaaataagagagaaaaaaaaaagtaagaaaataagatgacatacagctcgaatggacatttcctttggaagattcgggcgaaatacggcttcacacttttgcctcgtacgacagtgtgtcccagaatagcggatcggcttttactatcagagtctcagcatgacgatcagacgcaaaacatgcagagcagtcattgatgggtcgaatgtaatccacgagcacccgggggacgaataggaagatacaagaagtaagacgggacgggtcaagggaaggttgtactacaagccgctaggactcctgtgatgccaaagaagttttgtgatgaagagcccagaagcgtccgcttggaatatcaatcacatgggaaatcagagttccatgatgtcaggaggatcatgggccaagaggctataagcgaccctcttcaatgagggggtgcacgaaccacacgagtgagttttgacagggatggagctgagttgccagagcggatatggattccgggaaattataaatggaggagatggtccccagaatggaaataaggccgtgtgtatgacacacaatgacaaaagaaagagagcgatcgggggagttgcccacctttgagggtgcagatgagataatcacgggggggccacgaccgagtccgaaagatcgctggaagaacgctgaaagacggaaagagtagagaatcaacctctccaggccgagttggaggagttggaggaagaggagagatttagggggaagaagggagtttttgcggggacagaagagagagagaggaggataattggtgaatggcagttggccaaaaccaagtcggcgtggaatataaaaagaagaaaaataaaaagaagaaaagaagaaaagagagaaaacgaaaagaaaaaagaaaagaaaacaatgaagtaacatgcaccgcctacagaagagctgaacagctcgcgtaaacgccctggattttggattttaatttatgaagttgtacacaagttgtacagagttaggtatacacaaacgtatagatatagatactcgaataggaagaaacacatatccgtatatcgatatcttccctatctcaactacttcctaccctacgcctctgcacaacccttctactattgagtatcttaactatcaaatccctagtatcaccccccacttattatccacccaattgccgccggcgtcggactaatcggagctctatcattctccacggactcgcccaacgcatacataaaacagatatcaaacatataaaagaaataaaaaacccaagcgaaagggaaaaaaacgccaacaaacccgccagggtaaaagcaaaaggccccaaaagcggggtttgcgaaaatctccagggctgagagcgacggggataattcgttgggctcgtgattggtgcagcgccccgatttgatgcaacggccttttgcttttcctttctttttctcgtctcgttattttcggcgctgatggtggcattggcttttgtgttgtgttgtttttcttttttctttctatgtcatcctatcattttacccgagtcggtagttgtgttggttgtgccttgattcttgaactgcccatcacccgacctgccctcggacattctattctattctattcctaaacctatccctcaccctattccttgataggctattcgtatttctttgatgtgatttcagttcctaccggcccaggcgcagatagagctcatatgccggtagaaccaaattacatccaacgtcggacccgatctggagaatgaaagaaatcgggaactgcccgggacagaggccccatagctgatgcgcatctatcatgcaatcctataggagataaggaaatgtgttcacatgtctttggccgtacgtcgctttgcattttacctttctttgtatcggagtgttctttttccgattgtaatctcgccggttttatctgatgtatatatatttcggggcacatcctaggttgagttaaagcttcctacctacggtatactaccaagggatttagacttcaatatacaaggcagtattctacggatacctactagtactacacctaataccgaccctacatacactataaaacatacataaacataaacagttcatcttatcgtcattttagcgctgtcagaccaactctaaatagcggggctgattctcagtcctcaaccgaacaaagaaacggtgagttcttctctttctgttttccacgcggctcagccatatatgcacacgtggaaccaagggcgcttagagaccaaccgctggaaaaagcctagaacagccatttggtaggcatcttgcctcgcccgtccttgcgtgcacggggcgccgtgggtcgcataccctcgtctccaagactcgattggaaaatcgacccttgggagggttcgttcgcccgcagcccctcaccgttgagtgttgtttgccagagggtgcgcagcgcggagctccactctcccacagctcgcagccgctccacgtcactcgcactctccactaccaccgtcccattatcctggtcaatcttggcgttgagctttttgtccaggatgaggaaactgagaatgtccagcacctcgggcacggagaccttgatgtgtttggagataaattgcagcgaaaaccgcgtgtaaggcgcaatcaatttgaggaccgccttggtgcgcatgttgcggctcacctcgtcgatgttctccgcaatgaagggatcggccaggacgtcgggattcttgctcagcacgtcctcgtatgcatggatgtcgtctctttggaaggcgtccaccaggtcggtcatcgcggaaatccgggggtcattcttgtatggcttggtctcctgcgaatcgaacgggttgatgtcggacttcatcagcatggtcgtcaagacaaggtatttgagaacctggattcgttgcatagaacccgcctcgtcgtaattccggaacgactcgaaaaagtcactttgtgcctccttccagttctcttcgctcatgtgcatcttgcctccgcattcacggataatgcccatgatcttgggatgcggcacggccgaccgcactcggagagcgcgctcgtacaaggcctttagtcgtttgttattcttcgtctccgaggacatctggatctctagcgcgtaaagctcgagtaggtatgttcctttgctggtgtcgtccgacccgtcctctcgttgacacgcacggtgtaattcccgcatcttcttagccagctggccgtattgcttgcgctccagccacaggcgagctagtttaatatttgtcttcagccaaagccgctcgttgtttgtgttttggaacgattcgagggtcagcgagtagaactcctccatgcattgatacgcctctgcattatcggatcctttctcgataaagtcgagcatattgttgatcgatttctccgagtagtttcgtgtaacagcggatttgacgtatgtgagcagttcccggtagtgtgcgacggtctaaaagatggagtcagtatctgggcagctagatcagcgagatgagcttacatcgctgtatcgcccgagcttgaattccagcttgatagcctgctttagacctttgaatcccctatatcccatagttagcattgttgcgatcagcctagcagcagtaattaccagtcgcctttgtcttgttccatgggcgctatgcctaggaactcgtcgactgcctcttctggattgtcgaccttgatttgcttggcattgtagtatttgttctcgattccgatatcaccggaatcgtcgtcgtcggcgtcttcatattcaaagtcataactgtgattccggtcagctagtctggtaggtgaagtaaacaagggaccatactcctcatccgcagagtcctgcataaaatcatcatcgtcagacatcctaggcgtgtaatagtttgaaaacagcagaaggtggttaggatagagaggacaaagtggtggggttggagtgttggagaagctcggtcggataacagctgcgagcttccgccttgactatcgtgaggagagcactgacttggaattgtattcacggtgcattgactgtatgcgaacaatgtcgattcagtgtttgaataaacattgtccaaaaggtctatgctcattcaaagctaattttgaatggtttgtttcttattgttctactccatcgaatcagcctatctacggagtacctactccgtactgatggttcaagtgccaaacatacatacgcgagctattctaagcatacgaggcgtggctgataactcaggctatttacagcaaaaaggaaattaagagttccacctagatagttgtacttgttaccgtcaggggcttggtatgtgatttgtagtcctactagactctctacatgttgaaaacgaattgaatgtgagctttaacatagtaggaataggtccaagccaggaaaaaagcaagagaccctaagctgtatacaacttggtagtcttttaggtcgatcccttctagaaggtaggagtataacgctcaagatctaaaacactcaggaacatgcgcaaagaacccatacaatgtagtatgaaacagttataaaagatctagttaacagttaaatctcaaaataaaaaataaacctcggtggaccagaagggggctgatgccattcgccgatccttcagccttcagctcgatgtcattgacttagccagtcctggaatcttcccccgacaacaacctctctcttctactgtcacctaattcttccaactcctacgcgtaccacctcacacaccaaacgcacaatacgcggacgtactgtcccattaccccctcatctccttacttggagtctcctgaatcgctcggcaccatgcagctgtgcggccggcagaaggtggtccagcgcaagatggtgctgctgttagttttgatcggaatttccccgctaattattggcgactggtctgacattattccagaggcgatggtgcctgcggcaagacatcggcgctgaatgtgttcactcgtgggtgcgcaatctccccctcacccgtccccgatgatgacagcaatgctaatggactttgacaattagcttcttcccgacggtctagtaagaaatcctacttcttcggagcatactttaatgcaggttactgattctggttattgtctgtgctcagcgagcctacagtcttcggtatgcgcgcattcccccggagttgaatctcctgaacctgcagtgctaacctcggaggaatacagaaaactacgtccatggtacataataacctcactctactcctctgaccacgatcccagaaactcacatgccctagatatcttcgtcgacaacatacatgtggagctctcgctatgggataccgccggccaagaggagttcgatcgactgcgtgcgctgtcctacgaggacacacacgtgctcatgctctgcttcagcgtacgacaattccccctgtatatccccgcatataacctaacatgttccgatgactaggtcgacagccctgactccttcgagaacgtggcgtcgaagtggatcgccgagatcaacgagaactgcccgggcgtccccgtggtcctgaccgcactcaagtgcgatctacgcaaggacgaggacatgaacgacaaccccaataccatcagtttcgaccagggcctcgcgaaggcaaaggagatcggcgctgtgaaatacctgggtgagtgctcttcgatccatgtatattcgatccccggctcacattctttctagagtgctctgcggtccagaatcgcggtatcagagagagcttctacgaggctgccaaggttgctcttgctgttaacgcaggcagtggctcgtcctctggctcgtcttgtgtcattctgtgaggtgatgcattgcggtctgtttttgatacgcatggtattgctctatgtctgccatattggccttcgtttattcgctggatatctatcctgggaaggcctatttcttcgccatctgtttcttttttttctcgtttctcaccacgtttctccgtctctcccggttgggtttgttgattcccccatgcattaggtgttctgagcttgctttcgacttttttttttcttctccgggcagactatgtctgctccattcagacctcatagatatcggtctatgttgattgcatgattgcatagctctggatctccctgttccgagcatttcagcgaggtggttttttggctctcaattacgatacacaaatgtaatttttcttagattttgcagacttggtactttgttttctacagccgagctatcaaacagcatcgcacgcccaagcaacagaaacataaccctaccaacccaagcccgcatcatccaagcataggatcttaggataagccctatactagccgggtatcgttcatcaaatcctcctccgtaaccctataaacctcatcaatcccctcccccagcgaattcccagcaaaatccgcattaacccgcccaacaaacttctccacaaacgcatcagcaacatccccgatctccaatcccgaaacccccaccccctgcagactagtcgcctccctgccctccaggccacaagcgacaatctgcttaaagaaccacatcggctcatcggtaacattcagcccgacgccaaagctgctaatattgcgccgcagatgcacccccacagccgtgatcttcctcggctgctcatccgatcctgaccccgatcccggtccaggcttcacccacacgcccgggtcttccgtcgtaaacccatccaccccgtagctcttcagtaggtcgatgacgctgttctctaacacacggatgtggcaccgcggcgtgaggcccagtcgcttgaggtccaggatcgtgtatgcgaccatctggcccggcccgtggtaggttgtctgtccgccgcgcagggtcgggtggtactctgcctttgcgggatgcgtgccgtgcgggatgaagagggagcggatgggttctagcggtgcggggagggagaagttggggtctgttggggagggcgggcgtgtgtttgagggtgggaggtcgcggcggccggtggtgtagacggggtttggggtgaaggtgatgattgttgggtctgggggcgggggtggcgttttggatagggtggtgcttgggttgctcagctcttgggaggatattgagcctggggaggtgagctttttgtgtgcgaggagccgggttgtgagggcttgttggaggtgcgagacgcggctgaagggcgttgtgtgggggaggtggaggtgtgcgagtctcattttggtgcttttggtggtgagatgtggtgaggttttcggtatataaggatcgggtttctcagcgcattgtaggttggagaagagtttgcgttttccacggagtacgaggccggttgttgcggagaagctgtgagctcgctccgataaggtttgataagttcacatgccaatggcctctatattctctactatttcgtatcgacagctatttgtgttgataccacttctgtgtgcctactctaactgcaagcccaagccatttgttaagctaacaattttagaccaatcagcgcaaaggtaatcatacattggcgtagaatggtctaaatctaacagccaaatggtaccatgtactcgagtttggcaagagtagtgctaatgcggtaggattcataagtccattgctatacactcatcattcatccaaacggaaattagagtccaaactatgaagatgccacgccattgaccagctcagagttttgctcagcaggaagcagagcccagtcgcgcacgccacccttccaatccgcgatgcgaccctcggtaactcttacagtaacgagtcgcacatcagtgtcaatggaaacgctaggccgtctcgcgctaggatcctgttgctgctgctgctggccgaagagattgatctcctcctcctcgaaagtattattctccaaatgacgagccttacaccacgcttcctcctccgagccgggctccaagaaccgcgcctcgcccgtaatggtagtcgagatgctggacagcgcgctagtgttcaggttaagcagcaggctggcaagggaggagcgggtagcggcgggtggtggagagccgtcacggtcaccttgcgtcggggcccgggtaggggggcgatgcgacacccagtcgtggaccagcaatgagactcgcggattggacagcaagtggtttgttttccgcgatgcggggtttgtggtcatgatgatggtggggtgggggtcgtatggggtcgaggggagataggtgtaggacatcagtgagatgtggggtgttttatcatcgcatgttgccaggtgcagcttgattgggcgatatgaggttagcttgatgggttatatgttgaacggtgttatacttacgaagcgggagttcttaaggcacgagacgacctcggatggcaatgaggtagcgacatggggatgagtggtggtggcagacgcctcataagacagcggggggttgagtgattcggccatgttagagatttgagaaccaaaaacggtaatcgtgaagttagagcctcgggagaagatcgagatctgcccaccgggcggtgtgcttaggcactgtttggccaacaacgtcatcacttcacgcctgtggatttccaacttccaggcagcttgcaggttccgctccgatttacggatattggttattctgtgcttatcattgggcacagcagagagcactaggccagtgtacacagagcagtatacaatcagtgtacaacatacactgattaggtgtgcaatagcgtggagacactagacaacgtcatagcggcagatatattggatcttattgttatatgatattacgctcgaatacaagaaaacgactgtccacagctctgtaatactcataataagtggcgatgtgcggagtacagtatgagtaggctatgtatccatgtacagatccctgcagaagtccaatagtatcgagtacatctcgccaatgtcatcattacccacatttagcgcgagatcagctgtaaaccgagccaagtggtaccaacgcccctcgtcacgattactcccctaccgaaaacttggggaagctccctccccgcacataagctgcaaccatttgaagtcaacgactcaacagcattgcgattgactcggtgattcacattgtaatcaattcgcagcaactgggacaggttaattctatagatattcagctaatattccctggctctcattactggtactggacatttccatactctccgatccgaaaggtactccgtacacatccacccgatcatcgcccccttcttcaactcctctccctgcaactccagcctgatccctgcacttacctctccactcttctatcccccctctttactttgtttctccatatctcccaccctaaacctcttctcccagctccctctatattgtacctagcttattgccaacgtcggattcattgtcgagctctcttctattgttctttccacataccatcatgttggctccacgcgcagcccgctcagcgcgatccgtgacttccctcttgcgacccttcagctcatcagctgtggcctatcgttctccctctattcgagatattacagcccagtcgactgaggagtacctcagacggcagaaggagttccgcgagaacttagaacaggctcgtttgagaagagaaaagcaagagagtcagtctgtcaatgcttctgcttctgcttcttcccccctccgtgagtacgctcccactgctccgcaagtgagcaatgcgagcagtcaagatagtgaccgccctactttcgatgctgccacgccacttgatcacaaaggcctaggctcactctcaacgcaccgctatctaggggatgaccagcaccacgaaggtctggctaaacgtggccctttgtcctcgctcatctacggcaccaaagagggccagcattttgacaaggatatggaacgctccttctcggaggtcctagcccgcggcaaatacgttcattctatcgtgatgcacgacgtgaagcccgacaaggtcgatgaatatgtggatctggtgggccagtggtaccctcgcatggcacgaaccgaggagaaccgtgtcaacctggtgggcagctggcggacgcaagtgggcgacaatgatacctttggtaaatcacgatcaaataagccaaccgttctgtgcgctgactctttccttgcttaattagtccacatctgggaataccaacgctacgaaggctaccacgactctcttcacagcatctcggaacacccagagttccgcgaatttgatggcaaactcaagagcctgattaagagcaagaagacttcattgatgcaggagttctcgttctggcccacgagcccgcctcgccgcctcggtggactgtttgagcttcggtcatacacactgcacccgggcaatcttctggagtgggagacacactggcgccgtggcctgaaagcccgtcgcgaagtgatggaaggtgtaggcgcatggttcgtgcaaatcggcgaattaaacacggttcaccacctgtggcagtttgccaacttagaggagcgcaagatctgccgcgagcagtcgtggagcgtccaaggctgggccgaaacggttcacaagactgttcccttgatccagaccatgaggagtcgcattcttgtccccatgccctggagccctgtcggctaaattgaaaaagctggaacgtttcctttggcctattccttggatcttggcgtccaggaatcttcattgtttgaatgagccgaattctgcgaggtgtatttcccgagattggtcctacctcatacccttatttatctaccgtcgggatgcatgtatagggaactaggccctttgcatcccatatgtgctgtgacctaggcattaagcgtcgaatccattagtcaagcatcaaacctctttcttaactatcagttagacccctttctccccgtattatttgagcacggatctcactctcagtcctgagcaaaggccctcggataaccccacttttgttcctgtcaacacttgaggcctttcattggcaacgcttgggacccttaggcagatatgttggttgaatatcgacctacgcgtcgattccgagccgacaagaaccgagggaataagtttgtagtcaaatccagcgtatatccatctcgaaactaatttaaggcctcatcacttctctccgccggcagaaaaaaaaagtcaacaaaatacccaagtggcctctttctctcttcaacgccgatctttaatatcaagcctccatagacccctgtctacggctgttcctccctaacggagacctttttttcttcctttcttcatcctctctttcttccctttgtttccattaccctttcccggcgataccttctccgatttccttcattatcacctctcggccctaaacgtgcgtctacgactctcaaaattgcctgaacagcacgtattggcaggcaccgacaactccaccaaatatatgcctcgaggtccgaaccgagtacccaaaaaatagatatccgcgcgttcaccgacgcgcaagacaaccgaaacaatggtgtacatccggcaacatgaattggcgaatctgaagaactacaaatatgctggagtcgaccactcgcctgtcagccggttgattctcaagccgttctacaacaaattcgtgattcgttgcttcccaatggggatggcgtgagtatttccctctccttacttttccccggactatgcatgcatggattatagatcctctggaggcctttttttgaataccgagacgaactatacgcaacgcaacatggaacatggctgactttattcttctttctgcgcgtctacagacccaatgccgtaagtcttgcccatgagacattgttacaattgccacgtataagaaaaatatcctaatctcgctcgcttcggtagatcaccctcaccggcttcatgtttgtggtaattaatttcgtcaccgtcatgtggtacaacccgaacttggatacggactgcccgccctgggtctatgccagttgtgcgattggcttgttcctgtaccagactttcgatgccgtagatggcatgcaggcgtatgtctacacttatcctgacagttgaggtgctttagatactgactgcgtttagacggagaaccagacagagtggcccgcttggcgaactctttgatcacagtgagttactgaatatagtacacaaaaggccaagttcatggattgctaattacttgtttctacgttactaggtgtcgatgcatgcaacaccggtctcagcgtcttggtcttcgcttcggcaatgaacatgggccagtcctggatgacctttatcgctctattcggatgtaagcccagccctgccctgcccttccacgcataaatagtctctgacaatcgtagcaacaatcaccttctatgttcagacatgggatgaatactacacgcaaatccttaccttgggcgtgatctctggccccgttgagggaatcctcacactttgcaccgtctacctattcaccgcttacatgggtggcggtagtttctggcaccagtccatgctggagaccatcggcgtgccgaagcctagcttcctctcaagccaggtgtacaacatgccgttcacgcagtggtaccttgtgtatggctccgttgtgctctgcttcgccatcggctcgagtatcatgcacgtcatgaaggtgcgtcgcgagcgaggccaggaccccttcacgccgctgtacggcctcctgcccttggtggccatctggagtcccatttttgcctacctatacctgcagccgatgattttggagaactacaccatccccttcggattgtttgtgagtctcgtcaatgcctactctgttggccgcattatcatcggccacctcactcagacgagtttcccctaccaaaacgtcctgctgtacccgctcgctctgggtgttttggacagcgcgggtgcgctgttcggcttgtggtccgcccctgtgcttgggtatggtgttgggcaggtggcattcgtgttcgggttattgggactggctgtcggtatatacggtagcttcgtggtatgtttccttcatgtttcccctccgcgcgacaatttgctgatcttgattttcttccagttcgacatcatcaccacgatatgcgactatgtcgatatctggtgcctcacgatcaagtaccccttcgtcgaggagaccgagcgcaagaccggtttgtcgaagaagaccaaataaagggatgtggcgcgattggcggcgcagtcgtgagtgtttcatgggcttgtggagaatggcaaagttcagtctctttcgccacaggcgaaacagctcaattgaggaggagtcgggtatccggattgagaagcgcgttggacaaatgatgcctggctaatgacttttccagtacatactttagtttcccttcggcacagagaagtagcttggagtggcgttatagcgatagaatatgagagttgtaatattgccgttcgtttcgagattgttgtagaagaaagtcgaagcacctgactgcctgccgcagcgagtccatgtctccactcgaaccagcgattgcgcgcgtgcttacctcagtagcttacctcatcagtctttcattggtggaaagttcgccgccttcccgaataaggacaagcgagggcacaaagcggcacaaagccctacctccacccaaaccggtccaaatcccttcagacttctcttagaagaccacctcatccgcatcacacaaggccatcgccatcagcgccatttaatcaactatctcgctgatcgactttcactcgtcaagatggtaagcccattttcgcccttttccgctcggtccctgttcgatgcgatacccacggacatggaagacccatacggattgtcgattcgaaaaattcaacgtccaccaacgctaacatgttgtcctcgataggttctcgcggtcgatctcctcaaccccaccccccaggccgaggcccgtaagcacaagcttaaggtatgaaccaaccgacccccgaaagaaacacgaaagaagaagtgaaaatatcaacccgacgaggggcgaaacctggatattcgacctggacctggacctccgatgctcaccatggagcaaatgggaaaggcaccgaacgacaggatgataatggaattcttctgggaaatggatatggaatccaatgttggatgaacaatgatggctgattattgaacttctctcgcctacagacccttgtgccctcgccccgctccttcttcatggacgtcaagtgccccggttgcttcaccatcactaccgtcttctcgcacgcccagaccgtcgtcatctgcgccggctgctcgaccgtcctctgccagcccacaggtggtaaggcccgtctgaccgagggctgctctttccgccgcaagtaaacgagaaacgaatgaaaaacttttttttcttgttatgttccggttgaaacgtcaaagagagaattagcatggagagaaattaggatgaaaataccaagacccggggttgacctcttaccttttttttgatcgtctcggcttcggttttcggtgtttcgggaagagagttgctattctggcccagttccatatactgggctttctctctttctctcttcctaccgggcttcaaaatgtcacataccaaacaacctttttttcaatatcacccttcccctaccgaaccacacggacatttttcttaactgttttttcgactggtgttgggttgtggggggatgcgattggcatatgatgtgatatggctctttttccatattatatcagtgtactggatcccctcttgaagaagacaaaatttgaatgtggccttttgggctcatttctcatcctatttccacccattgcttgttctttcttttgcatttcacggtgatgattaaaatctcagcgttgaattcttgttttctttgcgcgttatgacagatagaagatggagtgccccgaccctgtcaatgacccccacaaaagcattcaaaaaaaaagcaactagcattctgctaagggagttccggatatctggcacaaaaaggcaccttgcttgactttgtgctctgttttatgttctgattttctgctttcttgtgtttggtatattaaatgtatctgcgactactgtatatcgggttctacacctctatatcatgagttgtacctcacatggctgccaattgtagatgttatggttgtagcttacactgccagacattgtataccgttgtacggagtagttgtaccacatgatatccaatagcctctccgccgagactctaaggtgacctgtagactaaacgagagttgtaatacatacagatagtagctgtatcctccttaggatgtagttattgttgcccctcaggatgactgcgggtcccgggtgttccccaccttgcactgcgcttgtctgctttggtgtaggtttcaaagtgacgagaacgaattatactatactttgttgtcttgcctgatactctatctttttcgactatgcattttggctaaactttgtggaatctataccacctcaggaatgtatatgttatgggtgagaatccctgtcaagaatcgtctgcgaatagtttgatttcttgaaaaacgactcgggaaaagatataaacacttatttacatacatattatatcgaagaaccacagacgaaacttcatgaaattgcacttcaaggaattgacatattgccctgaagccaatgtcgctccttcctctgtgacagatgtaaataaagaaggcaaacaatgtaaactggaaggtgcgagggacggtgtcgcccttgaggaaggcaccgtttgttgagggtataaaagggtccctccccccatttctcttcttctcttctccttcttctcctccccatctctctggccaccatctcatcgtaacccccccccccccccccccccccccccgccagggccgcgagggtataaaaggacccttccccccatttctcttcttctcttcttcttctctcctccccatctctctggccaccatctctccgtccaccccccctccccttcccctccccttcccctccctccccctgagacagcgttgacagagggaaccgtagcacatgctgcttcacctaccacagggatcataacattaccattgttatgagatccatgtaggtctacatcagatatcaaacctggcgttctcgtggacgttcctgaggtcgtggctctcattgccatttgacaagtcccacggaatacatgaggggtgtaaatcttcgtagccgagttgaaatcctagacttagtctctccgcatattctaatgtcttgtttgtatcacagaatcgttcgcgctgaggtcctcgaagacggttctaacacgacacgatccatcttgcatgcgcaaccaaaggcaccctcttttcctctgtgcatattagaagagcaatactaaagcttaagagactgaacctctagtttgaaccaaggttgtatgtacatatggatatgtcatgatacgtttctgtttgtatcagaagcccctggacaagagttgccagtaatgaagagaagatagaaaatgaagaacaagtacagtaaagcccagcctagctcgtcatgatctccccatccccttgggtggatatatagaattaaataaaagactgagctttgaactcttactgaatcaaaatgagcgccttggccttgatctcggggccaaaatcaacagggttggaggggtcgccgccggtcagcatggccagctttccagtagtgtcgttgacgagtgtattagcaaacatattgcggccaccaatctcatctacagctaccttggcagcgttgtcacctgcagcgtacttgttggggtcaacagcctgcagccggttgtggctgttgcggacaaaatcgtacaagaagtagatagttgggtgccggttagggggattgcactgggggtgggcttcaaatgcactgttcaacttgttagcaacatatactactatatttctgcgtggtggggttgtagggtggggggaacatgctcaagtagagcctgcatcttggcattcatgtcttgaatattgatagtatcagacatgacggcgggttgtatatggtatttgtcagaatggaaggtagaattgagacctgaattggatgtttgctgatgtgacgaagctgtttacatttggaatttcctaaataggaccccgcactccgccttccccttccttatctcttatcggacttacatcggagaaaaaagagtccttttcttccaaggttctactctttcctcttctaatgtataaagcaaccctctgctctcagtctttaaaatccctcctactcaaacctacccaagcccacctcctagcaacaatggctcccaccaccccaaccccaacctcaccgcggaaaccgctcaaactgctgatgctccacggctacacgcagtccggcaacatcttcaacttccgaagccgcgctctggtaaaacacctccaaaagtccctgcccctctacgaagtctccgccgcatacccaacaggccctatccgcctccagcccagcgagatcccaggctacgagccctccccagaagtcaacccagacgacgagatcgaagcctacggctggtggcggcactccaccagcgcgaccccgccgctgtatgccggcatcgaagaagggttcgcgaccgtagcgcgcacactgaaagaagagggccccttcgacggcgtgatcgggttctcgcagggcgcggcgctggccgctatggtcgcttcgctgctggagcctggccggaaggagtcgttcgagcacttttctaagataagcgatgaggggggcgcgggcatggatttccctgcgtcgttcgcggaggacgggttccagcatccgccgcttaagtttgcgatttcttactgtgggtttagggcgcctggggctcggtatagggctttctatgagccggcgattcagacgcctgtgttacatgtgcttgggtctttggatgcgattgttgaggaggtgaggagtcggggtttggttgaggcttgtgccggtgatccggacaagaatgggttggttgttttccatcctggtggtcacttcttgccgagtaagcggccgtatcttgatgctgctctgacttttattcgggatgaaatggatggtaatggcatcttctcgaagaaaaatgaggccaaggaggtggaagaggatgtgaatgatatggatttgccattttgaggacagagcttgtacatatagacggagctagatttagattttttagaccatgcttacatgtagcacatatacacccctaccctaagaataaagacttgatgattggtactgtcatgagacagaaatttgctgtgtatgggtcatataaaggtcaatgctgcgacttcactactcatgggtctaccggcgaattattttacacgcggtggcagcaatccccgcgcccaagtcctccacattcatctcaacttaatgcgccttgcccatgtcactgcgagtgggctgaatacgggccatcatctcctccttggtgatcagatgatcgatccgctcgagcagacccagcagattcttcatgtcgctgctccactcgttcagaacgtcatcggcatcccggggtttggcaaagttgaccaatcgcgcgggtcggtcgatcttggcgtagatggtcttcgatgtgaccagatcactaatgtacttctccgtctcttcctcagtcagatccagaagctgggtcagacggcccatctgaatgcgagtgtagtacttggccactacacggacattgtgctcaatgacacgcttccgcaggtcttgccacctctggtttgcttggttctccgtagactgctttggctcggcgtcgaacacgtctgtgctgcatagatgggggccgaactgctcggcgaccataggccagcgcatcagctcggggatggtgaacagcttcaacaagcgggattcctcggggacttgtgacagccgtgagtcttgcttgatgcggtgcaggaggtcggattgttcattatcatagggagacaggacgacgtagtacacaatgcgggcgagtgactatagttgggttagtggcaatctaaattttgagataggtaagtttacttacggcacgcagctgctctgggttgttctcgactgcttccgtgtccaggacttcccggtagttcttgcaaacctcgagatatttgctatcgtggttggccaagataatctgctgttcgaagtaacgaagtttgagatctgtgacgtcgtcatccacctctatgggtgcctcatcaggcccacgggtcttctctcgctcctctgcctccttcttgagcgtctcgatctgctcagccgacctcttcggcttgcggttgaagtaccgcttgttgatcttgcggctgagaatctgggcctgggtccagtctccgcgctcaatgcacaaagagacctgctccagaatgaattctgtcttttcccgtctcgtcattgacccaaatgtttccacctgcaactcacacaggatgtctgctgccgaagtgagatcaccttgggtcttcttgatatttgaaagtatgcgggtaacacgggctcgctctacttcaacaaagatctttgcgataattagcatcactttggtcaagatcaatggttctcagcgtacctttccctcagtcactgtgcgcagagtttcgataacagacaacttgacctccaggctgggtgtgtcatccaggaatgtcatcaccgtctgcaccatcttcgttgtggcctgcttgagttgggcatgtttcttagataggagcagcacttggtcgttcagaaggttccagtcgccggagttcttgctgatggtgacaatggcaatcaggagtcgcgatgtagtggcaagatcggatgcctgaataagagaatcttgattagtttgggtaggggagtaatggggtggcactcggcgtcatacctgtctggattgcttctccaaacccagcagcttatcgactgctccctggacatcggtctagaaccatatacgttagcatcaactttgatatggatatcatgtccgggtgtacctttgcgagatcttctgcctccgggatgagcttgtcggcatccttggtgaagtccttctcgggcttcagcaggccggacatgatgacgaatgaggctggagggccggtgaatcaatttaaaatattaataggttagttgataggaaatttctttaagcaggtttgttgcgcttgacaacgtgagattcgcggaatgaaagaggatgatggagatgatgcttgtagctccggtgttgcgcccttacgagctggaagctccgtcccacgtgaccgaaacatcgccttccactctgtctggagtacttgcagttgtcctctcgtctagcacttgggaacatcccagctagtatattccagtctgttatggatacatatataactggtaatttaagccagagctaatgatctatatgttgttctctgatccatgtttcctgttcaacgaagttaaacatgccatagcgaccaatagaagaggctctaaaccgaattttaagaccatctaaccaaccgtcagaagcctctacagctataaataataatttcactataaatcgtataaatctacattgtacctggctgcagcgggatatgattgtgcgtggcctttggatcatggatcgtggtgatttcccaaggtcaccctatgcctactcgggctatacctaggtaggactagtgtcaaatcatatcccgaactacatccagacacatgtatgagcgactgaagagcgacagaagagcgattggattaaacaatagaataggaggtacactatcactgttttcatggagcaagagtttgcccatattgttctcaagagggggtttcgactcgttacatgcgacttgacatttatgtgcacgtcaggctacatactgcgtgagggtagccatatcacaaactgtacattagttgtatgaggaaatacgtctgaaaagacaccattctgttatccttagatttgatgtcctcaatcttattttgagccaaatgcgttagatttccaagtcctacgtcgtcaagaaagaggcatatgcagttaaagaccacgcacatctcttactcgtgtactcccactaaactactttaggtaagtctccctgcacttccccggcatttggagtcacgtggtgacaagcacgcaattgcctttaaccgttttaggcaataaagatgtatagaaatttttagaaagagttgtgcgtctgctatatatgagtcaatggtataagttcgacctcaaggacccttttctgactcttgatcacctttacaaatcctagggcttcctccaggactgtcaattgtgccaggatcatcccccacttcgataatccttatcgcccgttatcaccaatagtgacaggccttttactcagttttgatattcgtcgctttctccgcggaagtctagaaatcacttcattggtcggtctttttgttaaatacaagcttcaattctcttggaccctcggaactccagatccttccgcaattcggtctcgattacctctctcaaaccagcatacctcttactagatttattggcggggcttgacatttcgttctactgtacttcaccatgaaggacgcctcatgcgatcctagtccaaccgcgccatttatggttgcgtggaataccgactcacaagtccacttgattgtcggttcaaattctcttgccgccgctcgatgtgcgaggagcctcgaggtcggcgcaaagccgatcatcattgcgccggagaccgatgacattcatttcacactatctgaacatattgccaatggctctgcccagtgggttcgtcatggattccaagacgaggacttgacaaccctgggcagagaagaagttgatcacgttgtcgacttggtctttgtcactttgggtagcaacaacccattaagtatgacctgcttgttcaattcacaaaccactcttactcacatttcctactaggttcacacatatcgaagctctgccggcgcctcagaatcccagtgaacatatcagatgcccccgaactatgctccttcaccctactctccacctattcagacggcccccttcacattggaatcactacttccggccgggggtgcaagcttgcatccaggctgcggagggaaattgctgccttcctaccccagaatcttggaacggccatcgacagacttggtgctgtgcggagacggctgtgggaggaggacaatgccgctgggctcgtagaaaacatattcgacagagaggacgacgatagtacaggccaaaagcacaccttcaacaacttggtcacagaagacgatgctgccgccgcaaagacaagaagggtgcgctggctgtcccagatctgtgaatactggcctctccgaaagctagtatctatcaccgatgccgatatggatgccatcctgaaggcctatacatctggcaatgccaccataaatgacacaaacggcgtcgataccccctcaaagaagggaaaaatcgtcctcgcaggctctggtcccggtcacccagacctactcactcgcgctacctactacgcaatccacaatgccgacatcatcctcgcagacaagctcgtccccgcgccagtcctggacttgattcctcgccgaacggaagtccacatcgcacgcaagttccccggcaacgcagaccaagcgcaggaagaattcctcatgatgggtctagcagctttgaagcagggacggcaagtccttcgcctgaaacagggagacccatacctatatggacgcggagcagaagagttcgagtttttcaggaaggagggctattctccggtagtactaccgggaatcaccagcgccatgagcgcatccctcttcgccgatatcccagcaacccaccgcggcgtttccgaccaggttctcgtatgtacaggaaccggcagaaagggggctgctcctaaccctcccacctacgtacctactcagactgtggtcttcctcatggctcttcaccgactttctgctcttgtcgagtccctcactaccttccccgcagaagacgctggttcccagtcgcgcaaactctggcccaaggagacaccctgtgcgattgtcgaacgggcatcgtgtccagatcaacgtgttattcgctcgaccttggagcacgtatgcctggcctttgaagaggcagggtcacgaccaccggggttgctggtcgttggtgccagttgccacgtgctgcacaatccccaaggccagcgatgggtgattgaagagggcttccatggactggatgatatccgcaatgaagtggctgcgcaagtggacgccgtcgctgtgtccgtgaacgagaagcagtgattcaaaattttcttttatatatatttccgagcgacggttgcatgtacatagacagcattcagatacccctagaaacgagatatgcatgatcattgaagagtatcattatttgagaccaattagtattttgaaacacgtagattaatgttgtataaaatgtacacctattttatactacgtggaagaaaagaacagggtgaggctaaaaatagtggaaccccggcccggcgacgttgatcactccacctcattcacatcttcaattctgacaaccaccctctgccgcaaccatgtcggccaaagccccaaagccagtctatttctccaacggggaggctctccagaggtgattttctcccttttctgcgactagatacccaaatcgctgaccagtgtgcccacagccccccgctcaccgtgcgacttacccgctttgtcgagagcatttacttcttcctcggcctgtacttcactactctgttctcggtaggtacctcttacaggcgtgattatatgcgacatattgttttcaccttgcttctcgtttcagcctgcctctctttcatatcccgcaactggactaatctgacatatcctagctcgactcatacgccgctgccgagagctcctctttcaacatcaaaaaccagggaaacaagtatactactcgccctcgctggggaggtagcacaacctcattcggtggaggtggtggtggaggaggtggcggcggtggtccgggatttggtccgcggcgcgtgggacgtgtggatgatgttcgtggaccggagtgcaagagctgccaataagcgaacagtcaacgcgattgaatcgccgcttcaatatagcgtcgaggagagaaaagaagttaatggaccaagatctccggtgccagggtccttcgttttgtcgtctttttggccaggaagcttgtgatatgcgactgtaatgcacttttgatattcagcggaactttgtactatgctacaacaaccttcgaaatacatatactacgggctaatgctggtctattgaacttgatacatcaccggaacttaccgaaactgatagctcaagacaccccttagcgccacaacaccgcctcttcaaggtcacattctgtcaacgggtcgtcatgatgattatagaagcgccacgtgacagtctatgctaaccttggaagtgtagtaggagacttgaaacacatttccggagggaatccctaaacctagcatgcgacgtgctatccagcccaaggaatactacacaaaccacccagcatgagcgccatcccatcaacagacgccgaatgggcgcaaaagatagccaatatgaaggagaaactgccgaaaccctcgctgtcccagccgccaattccaacacaaatcaaccgcacaatagaccacaccctccaggtgagcccagttgaagacgcacagatcgacgcgctgtgtcaagaagcccttaaatacgaattcgccgccgtgtgcgtgcgacccgagcacgtcgcccgcgcagcaagccacgtcaaaggcagcaacacagcggtcgcatgcatagtgggcttcccggaggacgcgcacaagacagccgacaaagtacgcgacgccaaagaggccgttgcgcagggcgccaccgagctcgacatagtgatccggtacaacctgctcaaagagggccagtacacggaggtatacacggacatctatgcggtgcgtcaggctgcaccgtcgccaatcgtcctccaggcgattctggaggcgtcgacgcttgagagggatcagcttatcgatgcgacgatcgtgtcgtgtatggctggtgcagactttatcaagactagcacgggccgggatggcggtacgagtactgagcatgttaagctaatgcactatgcggcggagatgtgtaggtgctcttgcaggatcaaggctagtggcggtatacacaatgctctgactctgttacgcatgcttaaggctggagcatatcgcattggaactactgacggggttaagatcatgatggagatcgatgagggggagattcttgaacaaggatctggccatgcggtggcttgaatctttctgagtttctcggggtgcgtgtctttgacgttatcaggttaatttttttatgtttggcagtgctctatgcttccctgaatccaacagggcgacaatccttactgttctgcttgggacccaatatctctgtatgtagtatgtagttgtgaatagatcgaccccctgcgtatagacccaacgggagggaccggcgcgagaagcgggaaaggaacctagatgatatacgctcaaggattgagaccttgctaaagctcgattgccatagagatgcgcccttggtaaacaagagaagagaagcttgcagagcttctgtgagacaattgtacccacccttgcgcatcttgccatgagagccctgcaagccctgcattacccctttggggttgcctcgcgaacaccctgaccgaaaatgagaccatcccctcctaaggtatttatctcatcttgtagatgtgaaaccctgttttcagaaccagatgattattgaaacagcatacgaagtagctcgtaaaaagttggacataaggctaagctgctgcccaatgaaaagaacacacttagggttaaggctcatacattcaaagacatggatgagaaccgtttcaaggggatgcgacaaaaaatttgggtaatgaattgcactcatatgcaaagttacgaacgtggcggacatttattattgacctgaaagctcccaaatgatatagtatatactaatccaaaaccctgcgccgatccattgacatgccaatcaaaaatccaaggctttttttattcgtcgctctgatcatccgagtcactggtcacagcaccatcaatgtccatcttttgaatgactgcatcaccattgcgacccttcttctcggcagcgagccaagcttcccgtttcttcgtctcgtgttcctgcttccttgcttgccgcaggaccttctcctgttgtgcggcctcctgcttctcatgcagctcattgacataatcctgcagattggcgagctccgagcgcagctgtacaacctcatcatccgcattatggcgagcagtctcattcaccgcaaccttcttcttaagcacagacacctcgttttctagctcggcgacctgcgaatcgcgggctgctgtgtcttccagggtccccccggccggcgcggtgcttgaggcaacgcgggtaaattccgtattagcaggctggcggaatgccgcgagctctgcaagaccatcctcgatcatggagatggggaaagaggagtgagtaagcgcctgagaaaattgtgttggtttgcgggagtcagatggtgcgatgatctgcgtgtggaacatatattctgcggggacggcgccaggggcatgattcgcagccgaatggccactatcatggcgcggcttgacaatagtgtgggccttcctcttcaaatccgaagaaggatgagggatcccacccggaggcagcatgatcaagttagtgatcgggtgcgtgtagtcggcaactgatgatgtgtacttccgtcgagcgacattccaggaaagcaccttgccattcgcgtggcccgagagtaacgtggttccatcatatgtaagggagactgtcttcacggagcctgtttcagccgagggagggagccaccggtcctccatggacacctgcgcgggtgttgattgtaatgaaggatcgtgaagaggatgctgcgcagagtggctccggtagaagtctactgattgaatgctgccgtcttcatatcccacgtagaaagcccggtcgaccgggtctagagctacagatgttgcggataagggaaggaggaaggttctcagtgcacgaccggtatgatagtcccacgcgatagcagtgttgtcctttgcggttgataccacgatgttatggcggccattgctatgtcctatagccagggaggtgatacctgcgcggtggttggagaaagttcggattggcgaattcgtgggttggcgagtcgcgctgagagcgggtttcgagaacgagagaatgccaggcaaggaccagacatgtacactggcatcggcggagccggacaggataaagttggacgtggggtcgacgacgagtgaggtcactggttgcagatgtgaggccgttgtggctacttggcgtcctgtacatgtcttaaaaagctgttagacgcatggcattaggaaatgtatcaatcagatctaacatacctcccagacaatcaatcgaccaccctcggtgcccaaaaccaatacatcaccatacttgcccccggcgacagcaatgctgcgtatccgctctggaaatgggacaatgccctcttggttacccttctcccggttgtacacgtgaatgacagccttgtctgcttgggcggcaaaaatatgcgacgggctgacagctagacaattggtcaaagttgagctcttcttgaaagtcgatcgcagtatcgatgaaggttgcaattcatggacgcagacccctacatctctgagcgaggctgtcggagctttggcggatgacagcgtcgacgccacaaatgattcagaaagcatcaggaatggaagaatgaggctgtcatacgaagtatgggaggttgggttcgaagttgtccattccttccgaggttttttttttttcttaatcgattgataacgaaatgtttgcactgtttggactataatctccggacttcaaccatccacgggccggatgtgatctatcctaaccaatttggctttctaactaatgcaatctactaaagatatccccgatctttcttcatcattagacagagcgagtgttttaaatgcatctatcgactgattgtgccgtgttgtgtatgagacccaccgggagttcgatctatcattattagtcagcgtcatataggtcaaccaagctcagctgcgccggtctatcaatcaagatgattctgtttctcaggctattcagactcaaattgcgtgcccatggtgaccagttcaagccctcatcaggcatttatatccaaccctccatgaactatgctgatatgtacaataacatcggtatgaaccagattcatgcaagggattgcctaaagttgacaagaaggggtggattgccgttgcgatgagacaccagatccaatgaagacccgctttaatacaccctctggctgatcctgttgcccttctcaagggcctgattcgccatggctcccttctcccccctcttgcatctcaaatgtctcattccaagtgcccagtcggaacccagctatgacgagctgaggcagcggatggggtctctccacgttgacgggctcccgcaggacgaaagattgagatctggagccaattgttgcccatcgttgtcctggtagctcatcttctttggaatgcaaggacgacgcgacctcattcccactattattacattggcccgtgcctaacacaacccgactgcaagtgttcgtgccaggcgacggaccctctttttatgctcgaagggggaatcgttccgttgaacattttccggctttcatggcagggttgtagtcctgtcaagggatgtgcacttgagcccgatgactacccaccttaaaattagctgactagcgccacactcgctgtataaggacatatcgagcccctgcagggactgatgcccatttgttttgacttcaacaataaacaaactggattgcaatctcatctgggtcgctcttgtgcaacacgttttgctttttttcttcgacatttcggaccaggattcttacttccagccgcgaataccattgtccagtatggactctggtgcgacagacatgcctagccatgcatggtttccggcccggatccaaacgcatataagaaatcagggctccaactcgtcctcactgagccacgatacaatggcaatggccgagccaatcccgtcaccgcgtcgatggtctcccacctatacaccccgcaggcgaagcagacagatgccctcactatcatttgtaccgtcaccagtgatgccgcgcatagagtcgcatgacttttcgaactcccaagcacggcgacccacagatcgggggccaggttgcatgtcgcctttccgctcggtccgaagaatgaaagaaccatttcagttaatgcttccgacatcaccggcgtccctcgatggccctcctcccaactttcctgaaaggccaagcaggccgtacacagcggcggcagatcgcacattacgaacatggcgctcagaccaaaacctgaattgtggcaacctggagggatttggtcttctacccagcccgcctatatcagaatcacgccccgcaagcacgggtcctgaattatcttactttgatgcgcagtcctcggatggatcaggtcgatcaagtgacgggcaggataagtctggtaccactaaacaggaagtttctccaacggtcgcgacgcttgaaatcggagaaaggatacaatacacagcataccgtcccccagattggaagaaccaaccgcgaacagatgtcatgaatgttcacgaagctcactcagagttcgtacgccagtgcgagtccagcaatgaacgggagtcatacgtccagtctccgaaaaagagtgcaccttctatagcatccccaaagtcaatgcatagcgagagagtggtggttcccgggagctcgccaagaccacaaagaccccggactgggacagtctcgagtgaagctagttgggtgccgagtaacttctcatactgtgaaagatggctgcaaggtgttcccgttgacaaggtggacgatcaaaataccactacaaaggagttcaccaatcggcgcaagtgccagattgttgagaatgatcctccaatgccaaaactggacatcatcccgggagcaaaagcccttgaagaacctgtggtaagtccaacaatctcttactgtgaggtaacactgaaagctaacccccatctagagatttgttgtcgccagcaagactaaaccgaaacttgtcgacatcgctcgacaatcgtcaccatcgcctccactaattccaccgccatgcttgctgccaaacactgtaccgacgaccccagatcagcgtcaagaggaagtatccgcatttagcccggacactcctctcgatatgtctgatagtggttatgggactcgcgactctgggttttcctttgatagctatgatgatagcaaagtggatcatgacgacgacgatacgtataccgatccagggtcactgacctcttcggacagtgttggatcgactgtgatatgcgagaagcctggatccgcgcagggagagcgcgaaacaagcccacaaccggaaatcagatcaggcagcgtgagccccaaggcatcattcctaacaacgacccatttacccgggccgacgtctatcatctctggaaacgaggatgaaaagccccggatatggcaccatgactggtccatggacgatcatgaatggactttagatgagctagaacactctgtcaaggattttcctcgtcacatgctccgcctcgcatcccctgtcatggtattccttcgcaaaaacgacgagaagaccctgattaaacccttccgcactatattccccgatgtcacagagaacctaatcgactgtctctgtgctgccctcctcgctcgaaactacctcctttccctgtcaaccatccaccgaaacaagccggccatcccaccgcgcaaagatgtgtacgccatcgacggcgtcccgaaaaaagcatacaccaccctaggaattcagctaccatctgggtctgcaaccaagcctaaggacccccttttcagctctcgcagcaccgagctccagggccaactcgagcggatagtggacaacctgctattcgccatctgcggccgatcagatcctactttgaaatcggccgtcgaagttctcgcccaagtccttgaaagcactgcttaacattgatcactccttgcatctaaaatttccttgcctcttttcaacctattctctctaaaacagactgaagctcatacttcgttttgacctctccttttctctgcaattcttccctgcactcttttcctcaagactcctttcctactgactgccctcattatatcctttcatatctgtgtccctaccattactcgctctaatcattgagttctctttgtccttgtctgtccacaatttccgctctctgtccatctttctactctttctactctctttctactctcttcttctcttttttttgcttttctcatacccttgcatcgcgcggtacttggaactttgacaaattcgtgcgtttgggatcaagcattagttagtctttcagtagcatagcatagcaaccataataataattggcatcgtcatcaaccagtattccaacccctagtcgtggcaacaaagtcgcccgcacgtcttttattttcaaatgacttccaatattcctccttaacaattcgaggaaaaacaagatatcgtatttattccaagtataacgtcaaggatagaccccttcccatggatactttcccgatctgatgggcggcgaaactgcttagtaatactttcccgcgggatccattgcgcagacaaactccagttcggctttcaccggttgaacttagcatacactcacacatcatggcagctccaacaagaagtttacggcatctgtcgtctttcagaaccaccatatccccggcttcgacattaattactcccatcggccgccggagctatgctacaacggactcctcatccgccacgaatacaccaggaactacacggcggaaacctacgaagttccaggataagctgaatgcaggaccttcattttcagactttgtttcaggaggccaagatgaactccttgacccagcggaagcctacgcccttaagaccgcgcttgtcggccccgccggccgcaagaaggaaatgactcgtttgcccgaatggctgaagactcccatcccagactcaaagaatttccagcgcttaaagaaagatttgagaggattgaatctgcacaccgtctgcgaggaggcccgatgccccaacatctccgactgctggggtggcagcgacaagtcctccgccacagccacaatcatgttgatgggcgatacctgcacgcgcgggtgccgcttctgcagtgtgaagacatcccgcgcccccgctccgctcgacccgcatgaacccgaaaacaccgctgaggccatctcccgctggagcttggggtacgtggtgctgacgagtgtggaccgcgacgatctggccgacggtggcgcgcgccacttcgccgagacggttatcaaaatcaagcagaagaagccgagtatgctggtcgagtgtttgacgggtgacttccggggtgacacggagatggcgacattggtcgcgaagtctggactggacgtttatgcacacaacgttgagactgtcgaggagcttacgccctttgtccgtgaccgccgcgccacgttccagcagtctattcgtgtgcttgatgctgcgaagaaagctgttcccgatcttgtcacgaagacttcgctcatgctcggtctcggcgagaccgatgaccagctctgggatgccctccgccagctccgtgctgtcaacgtcgacgtcgtgaccttcggtcaatacatgcgccctacgaagcgccacatggctgttcatgaatacgtgactcctgatcgcttcgaaatgtggcgccagcgtgcccttgatatgggcttcttgtactgtgcctcgggccccttggtgcgaagcagttacaaggctggcgaggcgttcattgagaacgttctcaaaaagcgtcgtgctgcccctggcaccgctgagcgcactgtggataagagcgctgctatcactgacgaggctacccggtgaggtggcttgcatttgaacgaatcgattcaactactcgggaataccttttctcttgtcatctgaccacctacatgtcatttaacctcttttggcgttttctttcttgcatcttctgggttgttggtttcggggttctatagagggatgcgtcatttcaacagttcaacatttcaacacaggaattgtactttatatcaacattggaaaagtcattagtggcctatttttgtcttcctaatttcaagctatacggaaaacaacccagtgatgcttttcttatatcaaatctcaaaatgtgggcctgctccgttcctaacccactacatcccgccgccacccgccacccgccgcatataggaacagcgataaaatgcatacgctataaggtttccatactccgtactacatatgtttcatccacattggccacatgtctgctaaaggcaaggaccgacataaactccacaactctcgaacacagggaaatctccaagtccagcctggcaaccagctatgagcgccggttcaggctagacttttcgaggggtgtaatttatccaaaaaagttatatcagggcaagattcaccagcacacgtagtgtatactctactgaaaacggcgtgttgcctatttaactactcaaggacttattgcacgtcggaggtcagctccgcgatgtcctcgttgtccatgccgagcaggtagaggatatcgacaaggctctcgccgttgatgcggacgggagcttctaactggaccttggacttggcgcgccaggcgacgccgaggcctgcagtgtggagcatgaggagatcattggcgccgtcgccgacggctagggtttgcgagagggggatgccgtgctcagcggcgatggacttgagtagagagcgcttgtgctcggcgtcgacgatagggtaggacggcaccaatttgccggtcagggtttgggtggcctcgtcgatttcgagctagatgaattgtcaggtcggatgaaatagagatagtaggaaacaggagaggcttacgtggttagcaatggcaatgtcgataccgagctgctcggcgagccatgcggccaggggctggaacccgccgctcaccactgcgatcgtgaagcccagagtcttcaatgcgcggcagagctcacgggcgcccttggcgattgtcaggatagacttgagcttctcgaagacgtctgcggagacgccgttgagaagactgacgcgttccttcagtgacgcggtgaaatctagttcgccgttcatggcgcgttcagtgattgcctgcggtggtgttagtcgctggcatagagaattgaagtatgtcaagaaggacttacggaaacctccttctcgacaccaataaatttggcaatttcgtcaatgcactcattttcaatcaaggtgctatccatgtcaaacactgccaggcgcttgtgtcgacggaagacggtctccttttgcagaacaacctcgacgttccactcgcgctcaaagcgccagatgctttcatgcttgcgcagatccgggaaggaaagatagtccgggtttggcggaggagagaatgtgacctccacgacgcgggggtgttcgtcgcggtcaagacagcggtgcgaggtgttcatgcgctgatagggcgtggggagggtttccaagatctgaaggaagttggtcaggcacagctgagagacgtatggcccgtacaggtgatccagtggctccggctctagggcaggcggctcccgtgggaatttgtccatgtcttgtgtcggggcagagcctttgggcacctcgggagctgggatcttgtcgcctggactattctggggccctaaatcggggtggtagtgggggtgaatggggtggtttgatttgtagtagatggtcgcgacgatttgcgacgtgccggttggaagagggttttcttggtggttgaagatgctatgaatgataccgctgtcggtgaccctatccggatctggcttgattggattcgagctaagtatcagacgatcgttcacctggttagccagaacctcgccgatggtttgactgattggagtgattggtgccatcggtttgtactgctggtggtcctgcaggaatgaactgctgcgcatttggccgagggacggcctggtacgggtagaatctgccataatgtactactagtgaagcgatccggtacagagttattcgcgagtggaagctatcttgacagatcccacacttccgaagtcaaaaacgacttgcgccggatcggcacgtgggactcggtcccaccaacacacacgtgactgctgttcccctctcacgtgagctaccgcttggcagaataattgtcaatgaggtgatagaaatggaccacctccaggaataagatgagctcaattttgggtataagcaccccgtcagatccaccatgacttcaggatatgacctcagagtcagatctatctatttatggatataatatactgcccaaaatacgtactccatactccgtacatactataatcacgattctcctaactatgcggtatgcccagattattggcgattaagaaacctgctaacatgatatgattaggaagatcaaacccttggaagaatacttccagtaataggtatcatcgactgggttggtcatcgtcaattaccaatatccgggaggttacctccatggcttcccgaggtcgttggaatcaataagcaaccatctacgccattctatagaacatgggcagaaccatctccgatatcgtgggtctggccatacaacgtctcccatggcgccaccgccttcagagaatgaccctctcttccatataggaaggcggtgagatcaaaatattcgagcacgcaatcgatggcgatggcgtgcttggggtcttttcagtccccactctgtccattggccaatggcatccatggaggtttgaaatgaagaatagccgatgaagactatgttagggacggatctccggatgatgtgattgcccctgctgttcttatattctcgtctctcattgtcatctgtgactttgttcttcttactctcctacctctccgcacattcaattctattttcaaccatccattcactaccaacgtcatcacagtgccatcccatcttacattatgcccgctaagatgcccaccaactactcctctgagatggagggcattgacaaccatgataacatgactgagtctggttatgtcagtgctggttcaggttctagcgaggactatgtccccgagattgtcttcaccaagccccatcttcagttcctcaaccgccagttgcagttcctcgagccccaaggttcgtactgatatccattgacccctctttctgacgacccttcatctgactcctccttacagagatcttgagatggtgcattacctcacttcctcatctcttccagaccactgcctttggtctcacaggtctcgtcaccttggacatgttgtcgaagctggaggtgcctcgtccccagatggttgatctcatcttcctcgacactctttatcacttcgatgaaaccatggccctggtcgaccgtgtgcgtcgcaagtaccccaacaacaatgtgcacatctacaagcccgctggcgtcgacactactgccgaattcgaagccaagtacggtgccaagctctgggaagtcgacgaccaactctacgactgggtcgccaaggttgagcctgctcaacgtgcctaccgtgagatgaatgtccacgccgttctcactggtcgccgtcgcagccaaggcggcaagcgtggtgacctcgacatcatcgaagtcgacgaggccggcctcatcaagatcaacccaatggccaactggtcctttgctcaggtcaagcagtacgtgcaggagaacgatgtgccctacaacgagctccttgaccgtggttacaagagcattggtgactggcactccacccagcccgttgccgatggagaggacgagcgcgctggtcgctggaagggacagcagaagactgagtgtggtatccacaaccctcggtccaagtacgcccagtacttgatggagatggagcgcaagcgtcaagaggaggctctctcgcaggctttgcacacccagttgactcctgtttgatctgtccttttgaatccttcggctgcatacccttcggcgttctacgtgatacctctccgttttttttctccctgttctttaagcggctttatttttccccagaggcggtacaaaagtactctttgcatttacatcctccctgcacagggagttgagtttagttctcgggcccactatgggaattgtttttgagacatgataatgatattcatatgatgacagaaataaaaaatgaatatttctcattaatctttactctccatctaaatagttacatgtaatcttataatagcctcaaaatccttggatctttgatttgtgtggcggtcacgtgcggtgccaaccctagtttaccctgcatcacggtatcatttctgatccacacaagagactcaaatcttaatttcgaagagttatttatctttcaaatatctagaagattgacatgatgagataaagtagaaactatggccttcaccatcaaagcctgtgacatcgggcgaatatcgtaaagacatattaagagaaaaaaagggtgaggagtttcgaaaaccaatcaatagcacgcattctcggccatgagcctcagagttcgcggcttgacactccctcgcgcaatacgagacttgcacgtacctcgaacacggatgcaggggcttatgtaaaaccacaattcagacagctcatctcaacatatcgacaccatcatccgggagatcatacaaggccattgcatccaccaaagctcgcctcggcactgcgaagctcttccgcggtagtgacagcaacctcacacagatcagatctgacgccaattacccgacatctacgggacacagcctgcgcaaggctctcgtcagtggtgctctaagtaaacggcgcgaatggttccatattgctgcccatctggggggattatgccctgctcgtcgaacatgttgacgaatgcctctagtagcaaagggacgataattttagcctgctcgtctggtgagagaggggagattctggatcggccctcgcaatcgtcgtagttgttgtatggattcgcgaagtcggaagaatacggcttcgcctgggacgccggggagagcctttacggcgaaatggtagtggttgcgtctgccggatgcatcccgctccgggcgctggagggcattgaaactctataattgtgaggcggtagcactttccattgttgtgatgatttatggggaaaggaagggatgttttgagttttccttattacgttcaattagccttggatgatctacgggtggaaaagcttggcatcccggggacgaaatgccttaattcatacttttcttccctctttcggctatgctatcttcacgctgcaatccccgcaggactatcagaaagcccagcttcttatcagtacacttcatcgttaacaagtgcttcaaaaactggtccattggaatgacccctaaatgttcgcagctccgccggtctgggcatctcagagcttgatgattatattttacttgacaagagctagtctcagttgctaaaggctttcgtgatactatggctacaactgcatgtagcatattgaaccattcttcgacttctctcacattactctcacttacgaagaccccaccttcgactccagacgccgttaaccatatagaagaccctctccatattttcttcttccccattcaccccatcttcactggagatttccttcatccatcttccgatgttggatatggtgatctccacaattccacgagaacaaaacccaaaaagtaaggggaaaaccgacggagagaactagacaagcaaacttcgacgctgtcgcttcctcagcgacggcgacagatgagatagtgtacgacttcagcggaatgacaatcgcaaacgacgacggcgacaacgaaagaagatttgccgggtcagcgactctctcaaacgaaccgacacgtcgactttgtgcagggattacctctagtcggttaggcggtatttagaggcatgtcttatccatgaaggcaacgtgggggaaagggaatggccctattcgctctcttacggcaaatatcagcaaataggctaggaaacatttatcgttaaaccagttatggtttcgaagattgagcttatatgctttaaacttaatactggcgttttatcctagtaatcactatatctaatcggggtaatgagtttaggcctaggttacattatagggaacgacggagtgaattgaaaacacctgactgtaccggatgggatgaatcaaaattatcattacagaaaggctacggagatgtcttggaatttgcttatcccaatgtggttacaacttacattcgagtgatgtcctcaatcttgacaggggtacgtgtcaggcgctagtcctaggccaatcattgggtccgaagatgaggttagcttgaggacgtgtttgttaagtgtaagccacctactccgtcttctcatctctactatcacccccaaaatagatgtcttaagctgaagtttgtcgaaggtattgtgaaactgttgagagcccgagagaagaaacaatagcggcttcctctcctggggcaatttcacccctgaggatcagcctgagatttccaacttctcaaaaacatggaaaactgcacctacttatagttctatgtcatcttcgaaataatcaaagaggatttgagaagcgactcagtatcgaaagactgttgaaagatcagcaaggttatcagaaattccttgcattgctatcatagggccgacgccacgatgaaagggaaacttgatggcacggcgctcgatgcgatcaaacaaggccacacagagattatggggatgctaactaagaaaggcgccgtggcttgatctagcacgcgaatcaacaagccaaatcaaactgatgcatggctgtttcgtggagacgacatgagacagactgttctatccctcaagtgctgcgactatcctttccaaagccaaggtcaaaaattcatggccctgtgtaaacacaagtcgaaaccacccatccttctcagatccaaaaagaaaaccgctggccaaaaagaccttcttttgcaaaaggtgctgcataacttgttcgccaacgttctcgcactcagtttccgggtgaagctcgcggtatctctttcccaggttcatccagacgaagaacgcagcattgcatcctgtcgcatattcaattccgtggtctttcaggtagttcgctgtgtacgcataggattccgacagcagcttctgattttgttgaatataccggtcggtgaaatcgaagtcttcaagcagaagagaagtcaggtgatccgtgatcccagaagcaaaagaatagagcgatgggcccgtcatcgccatatggaaatcacggttggcctgggaaatgatgacaccgagtcggataccgttcgcgccaaaatctttgctcataccccagaggacatgaaccaaacgggggtcgataatgccagtcagatcgatggaaagggcggattcgaatttgacaggtggtggatatttgtcgacggtattctcaaagaccgaaagcgcatagatttcatcgctgacgaaatggatctggtatttctgacagagccgcatcagcttgacgagcacttctttgggatagcagcgtccaagcgggttgtgcggatgcgcaagcatcaaagccttgactttcttaccagttgttcggtgaaactccagcaatgcttcttcatacttatccacgctttcgatgctgagagggtcgtgttctccgaaactgacaggaaccacgggactacgcgaacgcagtgagatgtcggggatgaacatgccgtagtacggtcttcctagaaggatgccctcgccgggatctgcgaatgaccatgcaacatgctcgaccgcagacgagacaccgttggtggctatgacgtggctcggctcgagtggcttgactggcttcagatggcggtccaagaatgcggcgatggctgccttcaatctggaagagccagatccgccatcgttgtaggtgaggtacttggctggcagctcgagcttcttgttgatgaatttgaggagctcgtcgtgcattagtgtgttttcggctacgcccacgttgacataaccgttggggtttgttgacgcgtcccacgcgtccttcatcacgtcccacatggggttatcggatccggcatcgacgacatcttgtgcccgacgggagagaaccgattgggccattttagaggtcgcgaaagagttttcacagagatgaagtacgaggaagtacgaggccaaatgagtgagtgaagagaatgagttggaagaaattggtcgcgaggcaggtccttagatatcggttactaacggctgccgcaaatggcaagtctgggttatctccatgcggacagagatatgaactgtcatatccgaagggcgtgggcggtgacaggtaaagatatcatctagggcatttcagccttctatattgatcttcacaacaggaaggcatgaatactctagtttatttttctagaacaaccttatcaaacccattcccgaggtccaatagtttttgcctttcttgacgtcaaatgccaagcttcgacgtgaagatatcatcatccccacatcaaaagccgaacaccgaactacagtccatgaatatttcgagaaagacgacaattgacgctgatattaagattgaaatatgcatctcaaattcctaatcaagcgcagacaacacagaattcaagcccattctatctgttagcattgattgcccagcacgacgctctagcccccgtacagcaaacccctcgaaacccaaggagtattgctcaatcagaagtatgtatcacacgtcttcaaaattttaaagtaacctccacagcacagttgagcacgacatactgaggcgtcaaattcacgccactggagtgacggtaggcaggcatctgcggatacaccgaaggatccaagggctcagattcaatttccctaatattcacgatatgcataggtgtaacatgcccacagggaacagctctcgcatactgatttaccttcgtgacagcatcgcacacagcctccttgcacgacttgccaccgatctcacgcctggtagcatcggtgaggtaccagctgatattgttcaatctagcgttggaatagcaatccagctcatcaacaaacatgcgcagctcgtcgaagtcaaggaatatagggttggtcttgacggtggcgcacacgtgggatttatcaatattgtttctttcaggccgttgaaggtcttggtgacttctttcgagaccgttgcttctgactcgcctgttgattatatggtcaggtggactgtggctcgctctgggaagcgacgtgcggtggaacgacctcgtagagtgatatggaggggcatggtcggtttgggatcaggaaccaaagtggacgatgatgaagatgatagaattaggaatttgggggtttaaatggccctcgggataccagacggtggaaaaaacattggggacttttatacagtctcaaaagtttgaattgattcttctcgaatacaaaccaattcttatcaatttacttagctttcaatgtcaaatgctaactataatcaagaccactcaaccaagcaattgctcctgcttagcgccctcaacagcaacgagataagccggacgatccttgacatagaactcgacgtcaacctttcccttaaaattagcctctccaccgtctagggtcccagccttgatgcaagtcatatcgggcatgatctctagttctgtgtagagactcgagccgcaggttgggcagaaaaagtgcttgttgatctttccactggttccgatcccatcgtaggaattgggggtacctatgcagaaagaaatgtggagtcagcaactgacaagcggattgtgggtgtgattgtgatcgcggtgcgaggtgtagatgtagttaccctttgtcactttgaagctggcgcggggaaccactgcgttggaggtaaatgcaccgccagaccactatttggtattagatgttatggtcaacgcccatcggcatatatgtataagtcttgggtttcaccttctggcagtcggtgcagtggcacagggcggacacatacgtgtcggctaggatgttgttagctttggatgtggtttcgatcaattgatataccttcaacggtgtaagcaatactgccgcacatgcagcttccagttaaagtcatgttggatgcaggatatacttagtatgcgtgacgaaacaccttggtggaatcgaagtgcaaaaagcggggttggtggcggctttaatactcggagtccttctggggtcttctccgatcgcgggtttaaccctcaatcaggtaaatggtcggtttactgcttaatagtctagaaaggcaggaatcgatataggcaggcagaaaaagattggcatcattcctagaaacaagaacctgctttatatacatcatccaagagtcaaaagcagtcaaaagggactcgacaccaggtctctactaaaacgcaagattaaaaaatcagaagataagaaataaatgaaggtaaagatgagacaagacagcaatggtgtatatcactttagatccacgcgagaaacatcactgaaaagggataagacagaaggaaaatggcgagaaatgaaggaatgacaaaaccggggtatagagaggatacataactgcaagcttgatcgaactagaaacgaagacattcaaatgcccccggggcaaaaggtgttatggggtattgagaaagtgagattgtatgtccacaaggacagtctcttggtcaaaatgccagcactttacagtatgggaacaactccccaaggagagccaagtttcatcaggttctcggctttttatatgcaccttcccctgcggatccatcgtctggggattttctcttcttatcttgttcgtcttctcgagagaagccgggaccgctttgtactgccggagtcgggaaggtgaggggactgggcagcatgttggaatctgggcctgaccggccaaagccccattcggggaagaagctggaaggcgacgggaggagtgcatcggatacaaagcgactcggcaaggcggatatgggcgtttcgatattattcgagttattcccattgttcgggtttccgctgctgctgctgtaagagtcgtttcgcgaggttgaaacaggaggaggcgggcgcgcgaacggatttggaggcccctgggctcccgcactcagtattgcaccagcggatggcgacggagggggtaagaccacgcccgggggtccattttcggcacttcctttcacaggcgtggaggttctattcccagcggaatcgcgtgacgagtcggccgtggcactgccaccatcggaggtttcgctgggaatctgcactttcaactgtggtcgttttgatggcaacggtccactgttagttcgggatggtggtttaattctttgcgttgaagcaactggccctgcacgaggagtttccgtggcagctctgacaggcattgacttggtaccaagggaagcttgtgggtcgaccttgagagagtggttattgtgagactcatatgaccccgctccagctccaaagtggcgggcgagcacagaatctcgatcatcaataggggtgaagatactccgtgattttgataacgacttcatttgaggtggcgactggctgtgctctggtttcattgctcccgaagaatcatcttggggatgctccgaggcaggccgttcttggtgaccatcaggcgcgaaccctggaggcatcgaatttctcccatgttccggcatatatgcttgcatatgctggtggggccccggaggcattcctgcatggccgtgctgttggaaatgctgttgggcctgatgctgttggctctggtgctgtgcctgctgctgtgcctgctgctgtgcctgttgctgcgcctgctgttgcgcctgatgttgagcctgctgctgcgcctggtgctgtgcctgttgttgtgcctgttgttgtgcctgatgctgttgtgcctggtgctgtgcttggtgctgttggctctggtgttggccctggtgctgtggcggcatttgctgtggcggtaaaccatgcgggtgcataggaggcgtcccttggtgttgtcccggtgggtggccgtagtgcgcaaactgtcccggtcgaggttgttggttcattacatgaacattcgggttgtacatggacggattgggcatgtacgtgaacccgccattttgggggccagggggtgctggcgggggaggtgtcccatgttgctgggggcctagatttgaactgactcgacggatatgatttcttgaagagggacgggaagtgccttgcggttgcggggtgccatgacgggtcatggcatgatggatcgggggtgacgcggagggtgcatggttcatgtgctggaaggcgggctggttttggaggtgagggggaatagcggggtggttctgaactgcttggatctcgtcgggagccggcgaggcctcatattcctcgtcatcgtcatctcgcttacccgcgaaatcttccggacctttatgctcgtggggaggaccgaactatgacgattagttagagattgtcgggatgaatcgaagagacatctacccacatattgatagcgaccaagagcctcgtgcatgtcgcatgatgagtactcgtataatttcttgttgtggccaaatataatgacagctacgtcgacggagcaaaggacagcaagctcatgagccttcttgaacagacccccctttcgttttaggaacgtgctatagccgaagaagctttgatcagcgactggaacggctgactgggatgattaacttacactgagcggttgcggtcatctttgatggccttgatctcaatcttcctgcgacccatgatggatggctagggtgcaccaattgcgcaccggtagcaagattgagaatgaaggtacaagcagccgcggggcgacttgcgagatacctcgcgactatatttaattacccaagatacagaatcgacgcgatggcgattctagccggtgccgcacggggtggatgtgtacgtgaagaatctcggtttcttccgaatgagaagatccgaagaacggtgtggctagtcaacaaagggatctgaaaccagaaaccagtttgttttccatgtaagaaaccctgtagatactggaagagggggtatggacgcgacttgaaaacacccccccgaagttcaaaaagaagttgaacccgaggagacggaagggtaggaaacaaaggaacaaataaaaagacaaacacgaagtaaatgatggaagctgcggagaaaggatgattgacgatgcaggaaaggttgattctaaagatagaatcgagggagagggagcccgagaagatttcctggctgactcatcagggccttaggcgccgggttctatatttatcttttggcagtcgcagcgcgaatatgtcgactgagcacacggtaactcgttgtagttagtgctgtccctgtggcttgtgacagtggagtcttgtccttaggatcctattggcaagacaagttgctgtgatagtattcttcgctctcagcttggatgggtctaccgtctatgctatgatgtcaacccggggaagctcaagctcaatatatacaacagatatataatgacatagtagtggaataatgatctacagaatatcatatttacattttcaggctatctccataggttatttaccccgtagcatagcttatttatgtccccgtgatatcgccaaccctatctccctacaatatataaagagagccagatcttattctcaagtaaacgtcaaagtaaacattcagggttacatatgtatatgtagaagtatatgtaggagtatatgtcaagtatgttcctacatcccccactgattggtccatgacatattgggcagatatacgctgaagacatatcgacacgtctaatgaccgtcctccaatagaacatgtcaatagccatacacaaccttggatccccgaaacccagatcaaacagataatcattgtatcatttctttttatccttcaaagttcccaaaatttaaatcgaaaatcttctttgtgtggcagctgggcatctaacgcagtcgagactcgcgggtaagtttagtttggtagtttggtttctgatttacccctgagcttgtgaatcgcttcgttttttttttcccttctctcccaacactttgctttcttccgctcttttcctttcctctcctttttcttttcttgaggtctcttgcgcggtttccactctgagaagcacagacaaataagatcctaaacgagggattcttttactttgtcctgctgttaccggggctgcaggacatcccggacacgcctagacgttttaactattcgctcggtcgaattgccgtgtcggttatctgcattgtggtcttttgaaatctctactaatctgttgtcgattaacagaagtcccaaaaaagcggacccttaatctctccccacagtccgttttctgacgcgcaaattcaattgccagtggccgaccatccgacatgtccttcctttctcgggtgtttcggggcaaggactccactgcgacgaagaagcaggctaaacctaccgcggcgctcaacacgggccctgcgaagcctaaatggaccgatgcgtggcagcggacagaggtcgccccagaagaggtccaagacctggtacgagggtgcgtgcatgagctcaaggcccgaggtaagtggtggatttccaactcgaccgtgagatacggacatggcatggtgcgtcggattgctgatcattcgtcgctgcagctcttcacacgccattcctcctcctaccgttccgtcctagctccgaccccagcgcagctcgcacgttcattcgcaattactttaatcagtctttcgaaaagggatcgcccgtgaacggaaatgatttgtcgcaggagctccggctcacggagccgatggtgagggataatgttttcccagggattatcagggggtcgctaatctcattcctatgaataggtcctttgcggtgtgatgaaatggtgctggagcagactccctggcggtgttgtcacttgggaggcgtacgaaaccttcaagatgggcgaaaatggtatgcgatattctttggaatgcggggaacatacgcgctgatgcaacattagattcggatatggcccgcgacgctttctcaactttcattccgatcggcggcgactccgatgcacgcaccagtattattctggacttcttcgatcttttggctgccattgcggcccatggaaaatccaatggcttgggaggtcgcaagctttcccgatacgctggctggtgggcgtttgagcatgtcgatacaggcaatggcttcgaggccgcctataagaactgggctgtgtatggacttcattaatccgatgtttcggatggtattctaacaatctctagtgctgccgatgctaccagtcacttgttcttcgcctaccttcgttcgttgtctcccgatgtccctcgcggcgtgagcggcatctcatcgctgccaatttctctccaatcactcgttgaagcgactgaatatcctcccgaaaccccgacattgttgcaagttacgactacaaaggtgattatgattgtggagaatgtctccccgaccccattctccttgttgcgacgcgcaaagaactttgaataccgcgacgacgactggcacctgcaggaatttgccaactacgaagacccagtcgatgcattgaccgacgagtgtctccgtgttcttagatgtatctcatctacgaatcaatccagcgtctcgagtgccaagcagtcaaccagtttacgggatgcatcttggtctcgcttcgaggatattgggttcggtggttcgattgactctgacccggaggacgaagccaacgagactgcttcgccggcgactgcaaggggtggatctgcagcgggcttgagctccgttcctcaatctggaactggggactttggccgtccgaccaccccgtcgtgggcagacttcatgtcatccggattcccggatgaaaacaaattgaaggaccacgtgggccctctgctcctgacccctgacaagttcctgcccccccttgcctctgcgcgtggcatgagttctcagtcgcacaagcgctccttggatatcgagccggctctcgagcctgcggagttggcgagtatcacctccctagacatggacgattcgttctggtgggtttggatcagcagtttatctggcgatgagccgtccgcacgcaaggctgtgtttggtcgatgcgctctcctggagaccaaaatccgggataccaaatggctgatcctcgaagagcagatcaagggtgctgctccagagcctgaggccggtgctcagattgtcgaaaagaagcgattcttcagctttggcagccgcaggggaaagctcaatcgccgcaagtcgttggcgaagaaggtgccttctattgaagactcatacaagcgacccaacaatcagggaacgcaaagcaagactagcatcggaccggatcagcacaagcggatccaggaagctgcggccgctctgcaaaagaagcaccgcgagcaagaagcggaggcgaaagagaaccgtgcaatccctaacgataaccgttactccaagaccaactccatcatgacccttcagcctgccattgtgagcgaggcctcccaggccatgaagtggactaagaattacgataagggtgccttcagggcagcatatctcaatgacaaccgcgctggcactggtgaagaacccgaggacaaacccgaggacaaacccgagccgatttcgaaggacaccgaggagaagtctaccgcgccattggcacctcttccaaccagcacctcaaagagtgttcccccaccacttcccaaagaagcagcagcagctgctgtgtccactcctcttcccccttctcctagggaggcgccaactaaagctgttaatgtcgctactcccgaagagaagaagcccgtcgcaaagcctgccgttgttgaacaacctactgagcgtcgggaatctgtggacgaggggggcaagaagctgaagaagaagactggcaattccggctttaagagcatgtttagtgccaaaaagaagcccgaacagcaacagcctctcgtgaagaccgctaattccaaggaaatttccactgtggcagctactcgtgcggccctcgaggccaaggcgaaagcagctcaggagtccggtcccatgaaaaagaagcctctcccgagtaccgcgtccgtggctaaattgcaaaagccctcgcctcagcgtgttcaaccgaccgccaaggaaccagtggcaaacccctcaagcccggctcaagcctccgcttctctggaacagaacggtgagccgccgaagaccagacgcgccattgagtatgatgctctctcgcgcgttgctacccacgaacttaaagcagccgatcaggagttctccaagtttgaccagggccccctggctgaccagcctgctttcgtccccggagattctcccatcacacctgtagctcaaaagtccgaggttccccagagcccgtccaacggcaatggtgttcgccatgaggtcgccagttcgcccgagtcacctgaagctacacatgatcgctggaaggcgatccgtgaggctgctgctcagcggactgctgcccaagaggaacaggtgcacgaccacgataccgaggccaacacccggactagccagtccgagcgcactgacgagggagataccagtggagaagagagttagtaacttcatccccaatactgaccacacactaacagttctttcacagccatcgaggcccgtgtcgcccgcatcaaggcccgagttgctgagttgaccggcaacgcggaggatggtcaaaagcgctagcctgcgacgttcccggacctgttttcttttgtttattatccctgccatttccccctggctctctattcagtatgatccaggatgtatcttttgttaatcgtatacccttctcccgaccagacattggtcgtgtttgctttgagcgcggtctgatgaccgaccaaggtcaccatttccatatcctggagattagcagactgacgaatactgcgatacgattgatggattctttatttggttgcgacatctgtttattttttctttgatttcttgcctcttctccgtcaatatttgattcgagtggacaaatatcctcctgccttggcttatttcttttccccacctatcgaatttgggctgcttttttgtctgtcacttgctctattcccctttcgctactgctattgattctggttcgctgccaatatgaatcgctttgtgcctttaagttgaagtactatcaatgtaatatggaactcttacttattccaagcatacaatcaaaccagactaattcactaatgggaaataacatacaatatagacctgctactgatctcaatcttaatcatatactagatactaatcctaaacccgaactacaaccccaaagccttcagaatcgccttcccaacccccgtcgccgacgccggattctgccccgtaataatcgtcgaccccgtcccagccgccttcccaataacaatcatctcctcccaaggcttcgcagctttcacatacttcccaccagtaacccggcccagctccgtctccagcataaacggcatagcagacgacagacccaccgcatcctcctcgttattcgagaacccagtcacgccaacgccagagataagcggcacgccggagggcgctgtggcatttagcaggacgcaggggccgtggcagacggcggcaacgggcttattggctgcagcgaaggcctggattagagcgagcgaggtggggttttcggttaggtcgaacattgctggtgtgtatatcgttagaggatgttatttgtatcgatgggatgatacaagtatagctaggagctgaagaaggagggagtagaggtatgggtatgggtaactcacgtccatgaccgccgacgtagaaaatggcatcgaactcgccggcgcgcggaagtacatcggctagcttttccgtgttcgtccagagagctttttgttctttcaggaacttctgcgatatcgggtctgactcgcacatctttatcgaggctgggcttaggggtgcttcgccgccttttggtgaggcgaccgttagggagaccttgtcgcggaggacttcgtagggatgggcgaactcggactttgggatggtatggttagtaaagggttcattgtaggattggtttattggtgagatggaatggaacatgtatgtatttaatttgattgaagctggaattggtgttgcatactagaaaccagccgtttggcttgccggtggtgccgagcttgtcttctgaggtgaggacgacgaggactttgggtgtcattttgggtgagttgttgattggtcgtataaatgaaatagtagggacaagttgattgtgttcaatattttcattttcaagtcggactgagggcgaagggtggctctgggtctttctatatgatcagcatcactgtacaatgtacattatgtatgtatcactatcccgtcattgactccacaaaggtcaataaattgttacatgagccaatgagatttgttagaagaagctctccactgcagaagatgtgcagctcccgatgtcaattatatgatgatgtcatagctcacatgctcaagtctcctgatgtccattcaaagaactgatatattaggagtcactatggtgtaggctgggtttatctagtcgcacagcataaacgcatagacatgagccctaaggtaaggtacatacgctgtacctaggtagttactagatatcgtaaacttggtatttggatattgaaaaaaaaaaagaaaaagaaagcatcagcccaggcgagcacagcctagcgattcttacgcgcagcggtgttcatgccgatgttctggttgctgtccaggatgctcgcagactagcgcttcttttcttcctcgatatttttgagacccttctcggtcttcatcttttcccggccttggtgtgaaactggtgactgagttatctgaaggcttccttttagttcatattgcgaccaaacttatatatataccacagttggacatcgggcttgagttcatggttgaacacatcggccatattgtgacgatctgacctcctacgtacgtgccggacgtgcctgcgccagctgtaccttccgtttctgatagaactgctccttcctcgattggaagtgaacctaaccgagcttccgtcattacagctcgtacaaaccccggttaaagtaactcgtagatagtttttctttcctttctctctctatactttgtaacttgagaaaaatgcactcattcttctgaatcgaactggcttgtaacacatattatgtacttcgtgctggtcacactgcttatataggcggggcgatagaagaaagagtaagggatctatggggacgtgattattcttatactcctattctcccagcgcgcgtgctcctcacgctaaggtagaaaggtgctacagtaaagattatatgaatataagagcataggtaccgcacgctgccacgcagtgctgtggtttttgtcagattgtgatacaagaaacccgtatgcagttcattatagagtgaataacatctgataccctgtcatcctatgctgtaggtgcggatagtggggcgaacagagctgtggaccaatgaaacatcatgaatggggatatgtaaaaaatgtataattatgtaatgatacatgtatagttaactagttatccaggatgtattagataccgattacggaagctaagccgattggtagagataagataaagacggatcacgtgattgatagggacagccaaactccggggaagactaaactccattttgtacgacaatgcataaggtgacatatcaaaaatgtccgaatcaccacggaaaatcagctccaaacgcgaccgccctaaagtacctttagatcaacgcaaacgcattgtcaaagcctgcacccaatgccgcctacgtaagcgtcgatgcacactgcagtcgcccgagggatgctggaattgcaggaaaagcagtgtgacttgcatttttgagacgagggaggacagcccagccgaatcaccatctaggtagcccatgagacacggacttccctttatttgatgcaatctaattcgcacagtcaaactcacatcgatgacgatgttgtagcacggttcaataaatcatatccgggggtcggtctcaagtcccaccatatatcttttcttttcgagatattcaaagacttgaaccaagactctagagatcgctcttcgaagcggagaagtccattttggcatactagacccccaccacagcatggaactagacctatgtctgtggaacgtcacccaaatgaagggcaactgcctggtagggcgagattcagccgcagatgtgtacttgctccgactgacaacttcactgaaggtgacgatatactgtcacacagacattttctcgcacgtgctgctgctgcagtctcccagtctgacagactggatcttccagaggataccgtatgttacatgaaaacttcatattgggctcttctgactgttgccgacttaattctcaatcagaatttctatcccacagacgaatcatattgtgaaaatgaaatcatcctcagacagcagatcttgaaagatttcccctctcgagccggggccgaagttctcatggcatcatttttctcctatgccgaggccaactggtactacttcgacgaaagcgcgtttagaaagcagctgtttgaactatatgacagtgacctatcaccgacctaccctagtctcaaattcatttgtttggccctaactgtcttcgccatgggcagccagttcgttcatctataccatgctgacaattcgattgccttggaagccatgactgtggttcaggcaggaatcccagggacgcggtacttccaacatgcgcagaaacttgtgccgcagataatagcttctccttctctggaaggcctgctgagctgtctactactcgccttgtatgtactgccgattcatagcactgaaacttgttacacatatcttgggcttgctttgcgcatcgcaatcagcctcggtcttcatcgaaaatcaacaaattcggcattatctccgtcactttcggagctccacaaccgtgtgttctggactacctacagcattgaacggtatggctttctgtatcaccttgattcttatctttctcttaataatatcccagaatggttgctctctctcttggctatcccgagacgcttcaaaccaaagatatcgactgcctccttccccaccgacagcctgacctggatgttccgggctcctatagagccgagagactactggcaaatacaaggttgactctgctgctcaacgaagtgatttgcttaaggtaagaagcctattgtaatctagataaaggaagctagacaacatccccagctggcatgctaaccctcaatagatccttgaagcacggttcgaccgaggatatccgaagtcaacttttggcttggaaggcagacctacccgctcaattagccacattggacgataactgtttacgactgaacgtgcatttacaactccactactctatgatctggatctatatcggtcgcgcagccctgatcgacaaagtgcgacgcttactcagcaagaaagagcccacaaaagatgaccttgacatagcgggcgacagccaagaattatcagacgcttgcgcagaacacgcagcgcggataatcgatctcattgatctgctcagaagtcgcgggcaactgagtctattctcttacactgatttccatacctgcagctccgcaaccatcatcgttctcctggatagtatcctgaacccacgaatgtcctcgtttccgacagtccggaccgcaatgggcgctctgcaatatatggctactggcagtgatttggccagaaatagcctcaagtatgtccacaatttccaaaacgtggtcaacaaagccttggcgtctatttcctgtttggataatgggaaatctcgccctgagggagagactggcccacttccgcttggggagccacgtgaagagacgtttaccgaaggattggacatgtaccagcatgaaggcgaagagcctaacctggccctattttctgacatagggattgcactcgaagactgttcatttacagagctacatcttcttgggcttgacagcctatactcgagtgatgtacaaaattggaacggcagttagaaataaatccacgtcttcttttccacttcaatctcaacagaatattctgtcctccttgattatccttttgcttctttcaaatttgtcaaaatgctatttgatgcacgtaggtgtctgcgtggccgaaagaaaagagagatcaacagcagtggggtaatatgataatgatttaactactagtaaatagcttcatggagacaaagtaaatagcttcatggagacaaagaacaaagcaacaaggcctaaaagccacaaagggcaaagaaagttttgacaagctgcttataaacaattccccaccgcatcaacacatcacattaaatcaaaggttataccggaaattcttgtcttccttgtctgtcaagtcctttccagtgacctcatccgcgtactcgaagatatccatccccattgtagaccgacgtttattgtcacgagcacacgtgaaccaatacactccgacggtcggaatgaacacaagccagctaaccagagccaagacgagaccactgcgatacctgggtgcatttttcgtgttccagagtaatggtccaactatagcaccgatagcgtagccaacgaagaacaaagcgttgacgatggcctttttggtatttccacgaatattggaagcgtttagacttaggatgaccgttaagatgtttgagatgacggaggcctttgtaaaacaagaattagcaaaattcagtacaagtacgagggtgtaggttcagccaatttacataccaaccacgatgcaacaatcataccccatcccgaggacaaggggagcgtgaatagtagaatgattccgacgagcgggacgattgtaagcccgatggtgatcgcacatcgacgattcggccaaatatagcagagacctattccgacccaaataaagaccatctgaactgcacctgctggtgaagtgtatagcatggtatcgaaatttgtgtagcccaaagagtagatgataagggaagcgaactgtcaccggagtatagtcagtaattgcacacatgtcttcttgtaagagaatacgcgacttactgcaatgactggcgaaggtagtgtgatgagaagcccaaataggaaactcaaatatgctctgatatccatagctgtctctttcaattgcgagatagagaaagttgtctggtctcctccttcggtttccgctcgcaatcgttgtgttgctacttgtcgctcttcaggggtgaggaaccacgctgagtcgggaccagcgggcatcaagaagaagaataggattccaaagaagaccgtgagagctccacagatgatgaacatagctttccattgggcaatggccaatgccgtgttgtgaccgataccatacatcattagagcaccgatgacctgagccagcccgttgcagctgatccatagactagtttgagaatttgatggttagatagagaaaaggtagattgggggttattagggatgtcctacccgatgcgcatgggatgctcgcttttcttataccagagactggtgagcgtcacaaaggcaggcgagaccgcaccttcagccaatccaagggcaaatcgaacacccatgaaagatgagaaggttgttgctcctgccagacactatcttgatatcagtatgtcttcaaacaaaatgttggtgactgggtaaattaccatgcaaactccaccccagagtatactatactcagtcagatttcccgaataatcttgatgaaattgctcgaaactcacataagacaggatacaaatttggcaagcggaagacgactcatcaagtagatggccgggaattccgacgccagctgcccaacgtagaagatggaccctagccaggcgaactgtgtgcccacaaggtgtaggtcatctatcaatccgaacacaccagcgtaacttagactctgcttgtcaaggtctagatgcgggatattagcggtatccaaaagcaagaggaaccaaaacatgaatcaacttacactgagagaagtaaatcaagcacatcttcaagcctctcacgatcagcacccattcccatgatatcgaacaaggacaattgcttaccagtggcaagaccaccaaatcaatcttccatctgacccgtctctcaatcgcagggtcaatgtggattgccgaagtgcctgtttccataacagtcttcggattggattcgtccaattgcatatctgcggttttggtatccgattgattcatcatgatctgagtgaattggataagaaatggacatgcacgatgtacgaaatctcactggggggaaaaggagaacaataccccggcctttatatatgacaaactaccccggatttggcttatctctcgacagccgtgaatgcatgtagtgggtaggtgcgtgcgatccacttctggctctatggaaacgcgacatctagtccaagccactgagcattggcgttatctttcgttggtttgttttatttaataaatcgtttatagggcaggataaagcctgtggtaggtaggctgtaatcgtgccaagcaccaacacatctatagtgggccccaccagatagtcatttgtagaggcaggtatctttagtatctcgactgcatacaaaaggtacataaacatagtctcaatatctataaaccttgaactaattagggagaatgtaggaatatagttgtagagtagacagcgtcttgattacttagtatcaatgttagtaggaacatccagtatagagaataataaacttttccacatgatgtctatatctggtgattgctaacgagtgtctttacactttgatatcatatactcaggatcaatattagtggtagataacttgaaccaggctttcgctatatctttatctctttagatttcctgaagctggtctgatagttgagaaaatcgagatgatgcctctatgttgctcatgtaccttttgtatagtgtcgccatacaaaagatacctaatccttacaagcacccggtgattagccggtgagatctgcgggtacttgtacccgcagggccggtctctgttgccaccgaagtagatttgggatgcgggtacacgtacccgcacgtcaaatgatggcgagtatcgatgccaagataatgctatcggcaattgtaatacgtccagatagactatcatttagtagatcatacttagtctacaataaaagagctgatcccactgcggtggaaattgcaagtttcttgttcatcctattaccaccttggaattaagaataaggcttcaatatctttgaacttgcctgatcatcgataacttgcttacgtctttctccttgttaccactaccaccatgacagcccggaaacccgatcttcagcgtattgccaagccttggctgctgggtgctcaacggacgtacatcttcacgtctgccaacttgattgaccttgacgctggaacagtcatcaagaacacgaccatcaaactctccggtggccttgtatcattagtcgacacctccggagtagagactggcgacaatgtcgaccccgacgctgtgcaaatcgacctgaaaggcaaatacgtctgcccgggcttgatcgatagccatgtccacatcgctgcagtacctggttctttgagcctccgggaactgaaagaggtaagcagtacccagagtatgctacggcaaccgggtgtttgcaagtccatgctggaccgtggtttcacgacggtccgagattgtggaggagcgtcttttgccttaaaagaatcaatccaggaaggcatcatatccgggccgagattgttcattgctggacatgccctctcccaaacaggaggccatggagatcgtcgtcagcagcacgaccccaatgagtgctgtggggggcatgtgaatggggtcggccgtatcgtggatggagtggatcagtgcctgaagtatgcccgcgaggagttgcggcagggcgcggacttcatcaaaatcatgggtggtggcggggttgctagtgccacagacgagatccaacaccttcaattatccaatgatgagataaaggcgattgtcacagtggccaacaatgcgggcacgtatgttaccagccatgcgtacacgccagaggcgatccagcaggctatccgacagggagtcaaggggattgaacatggcaatctcattgacaaagccacagccgaaatgatgaaggagtacggcgtctttcttacccccaccctggtgacatacgcgacgatggccgctcccgagttcagcggattcctcccccctgtttctgcgggcaaaaaccgtgaagtcttggacaaaggccttctcgccctggagctagccaatgagattgggcttgatatttgctttggcacggatcttttaggtcctctgcattatgcccaaagtaaagaatttaccattcggagcactgtccagacaccactggagatccttcgaagcgctaccacgactcctgcgcggatgctgcgacagaatgaattcctgggcaaggttgctccagggtttgccgccgacttgctcgtcttgaatgcaaaccccttggatgatatcaccgttttggatcgaccggacgttcatttactagcaaccatcaaggaaggccgagtcgtgagctcgcgttggaatgtgttggacgttgaagaaaaccgtctgccaaagatcgagtgagaggtggaggggagagaagatgtacagtggaaatgaagaagaggttcgttctggagttcattgaagagtgcttcgtggtggcggcgaaagttttattgatagagtcgataaacatgcacggtgtgcaagaaatggcaccttaaacgggagatcaaaagatacattacacagaacaatactttccttgataatacgagccatcccgcaataataatatgcttcgaatcgcggctattgctggcagataactaggccaaaacgagatcttccttgatacggtaatgtataaccgttggcggatcttcgtaggctctgttcccttttttatagctgccgcaatcagaaagagtgttgggcagacttacttgtgggctcaattccattctcaagtcgctacggagtacggagtagacgggaggggtttaaggtagtgtggggaggatgtgtggggtgccataacctcgcattggtccgtgcacagattttggaccagcgtcttggcgcataatgtcattacataatcctgtcgaggctaccagcgctgtatcttttatatggcaactatatacgaaaggtacatgagcacaacatcgaaaatagtacgcaccgctaagtgtacattcatgctagtcacatcacgtgcaacacttcttttacggcccgataacccctcttacgtctgtgtttggtttgacctcagacttccgtataaatgatctttgcatttcaaattcccagattcttccatcgcctacgttatataccttaagaaaaagccgaaagcctgcgtacattcaatccaaacctcatcgctagcatcgacttcaatcaaaaaccctatggcgtcttccccggtgcactctcatgttatccacacgtccaaaggtccgaccacattcaggacacacgacggagcgatgtttgacatgctgtattttgatatggcgcatcaaggttgaatggctgctaaatgtcgtgtggcttgtgcagccctgccagaggcatctgaaacggccgtcggaactgaggtaaaaggaaaactattaactattaagtgggaagagtgagaaattctgactcacactcgtccctggtcttcactatgagcagaggttgcttccacgtgagcgacttgaatgttggggttccgaattgtggtttgaccgggacggagagagtcttcagctctatactgcgcggtcgagagatgcggaggcatggctcagagaatgtttgtaaagaggccaacctgtagataataccggtgtctgtccggccgcagaggcaggtggttgcgtagtactagaaggtccaggatggtgattgcgttgctcagagccacagctaagctgaagcattcttctcatacttcaatcatcgaggtcagaagtgtattccataatagaaaagaagaagtaaggtagatgtctatactaaaagtgagttgggtgctttgtcttaaatctgccaggaaataatctgtccagtagacatactgtcaaagagaagttaaggttaaggcccctgaggtgggtccatatttactccgctccctccacttcctccgctcccaaagtctatgagtccaaattcaggtaacaaggcctcaatacccggttccttggcgaggggggtagttagctacatagctatttagttagttagtcaacttactaactatggtagatgattaaactactgccaagcaatatcaatgtacattcagatatgatcacgtgatatgccatgtggtggactggacccaccttcccttttaggaagtaattattcctatatatttcatagcaactccttcctcctaaccgacattccccccagtggctgagtgtgttgacacgcgtttaaaatgctaggttaggtactagctgtcagcgttcgacccacccagtgcacggtcataaatgttccaattacgctcccctaattggcccaccttgcttagtcgccggtcaggacctccagtaggtccggcaatgtgtgcgcaggtggggacgactagatcttagggtaaagatggttggggttacttaagcattatgatcccctaagtggcgacctgggagtataaccccaggcactggatgggaatgtccttttttgccttttttttcccttctactttcctctcaagtctatctccaaaactctatgcctgccgctcctctcccccacaaagctcattgacgcttactttagatatctatcatgaaagcagtattaatactatccaatgagagacatagtcacttagtcgcccgtaatagttaactagagatctgtttctaatttatcttagtccagtatgtatcgagcttgtatttttgtactatctcttctacattgtactccgtaccatctaccagatttctatgtttaaacccctccacggggaagcagttgaagcgagtcccgtagaataatatttgacaggagtgacttatttttgttaggtgtatacatacaaattatagatacctgccacattgattaaggcaggagcggtaccaaattaggaaggtgcacctaagatttcatccaaaggggggagggggggagagggctcgccatagcacagccctatatattatgtatgtgcagaagccaaaccaagaaaagaaaatcgacaaaaactccttttagggagacagacgaagggcccagatcactatacatatagactctctctgcgtgtacacaaacacacaatcccaagccaagacaaggctcgcatgcaatatacaccgggtatcgagcaaaaaacaacagcaattcatcgcaacggatcataattctgcagcgttcgcagcgttcgcagcattcgctctgcactgcttgctcatagtataaaccgcagtcgacgggtagcctcagccgccacgagagcacttattgccccgatgaagagacatatggagatggcgttatacctctccttgtccaggttcatccactgcgtgtccgaactgttgtcggccgcgggctcggcgcctggttcgaggaggctgaagacgatccagctgatgaaagtgccgacgaattggggtagcgtcgtgtacacattcagcacgcccaggtagatgccagccagttctcctgttgacgggatgttggaggcgcggtcctcctcgtcggtgtcgctgtcggtggaatcgtggtggttcagtcggagaacgtccagctcggtgtcggcggcggagttgcggaggctggcggaggtgatcattgtcacgccggatcgtgaggatgggattgcgggggaatagccgcccattgttagtttgttgatttccacgcccatgaaagcgaagggggcccagccgctgattgcccaggggataccgcatactgctactaggaaggttgcgaaggcgcgcgagtgtgctagaggggcgaatatcattgtggcggcgaacacgacgtgggatatcagccaggcggtttggaggtctggtcggattgcgctgatggctttgagaaccgctgcgacctttggcgggggtcgtgcggtgaagcgtatccgcttgctatcgggctgcatgatgcaaaagggtaggagtacagagctgaggactgttatggatgagaagaccgttaatgatagactgcccacgcggccgacttcaccaagcatatcggttgctttggccatgtcgtcttttggtacttcataacggaagtatgtttcaccaacccaggttgtgctgtagaagaggaaggggaaccagcctagttaatgttagcttgctgatttcctagtaaatgccgaatttcataccaatccaagcccaaaattgggcccagcaaattgcttgaatgcgaggcggcagttcgaaagtagttttgaacagctgggagaggacctgaatagcaccggcacttccatcatccctatcccaaaacattagttgacgacaataattatcggttcgagctcaactcaccttgccgagataaggactcgctcttttaccgagtatgaagtgactgccacagccaacaccaacgacaaagcagcgatcacagtcatctgcttgaactgcgtatctccaaggaaagtaccaaagatgctcacggtatcgatagcaccaaccacataagcaaagagctggccaatggcggacattctcccggctaaagaaaggtcagtgtgttttgggcggagacatatggggaagcgccataccccatgcggacccagcttgttgcgatggaatcggtagcgtatccacaatcagaccgcgacagcatgcttgcactaagatattgtaagctaccttcaattagtgcgagtacatgtgccacttaccaacgttgatggagaaatccaccgcataaatactcactacagccagggcaattgtgccatttttggcctgtagaaaaccaatattagcttccacgtagatagatttagccaggtgagggttccgataaacacgatatataccttttccgggtcttttacaaataaaccaacaatctctgatgtccaccctaagacaagcagacagaaagcgacaacaaacgagccaaagatcatgaaaggtctacgccgaccccatttcgatcgtgatcgatcggcaataactccaataagaggctggataatcaacccagataacgggccagcaatccacaccaacgaagtcttagactttgtcagaccgagctgaagaaggtaaggtgtacaatctagcagcgatcaagtcagcgatcataccctaagcacctaagcactattcggaacgggatgtgaatagctcttacaagtcatctcagtaccccacgtgaacctagaaaacaccaagtcagccacagacacaaaacaacgatccatggaatcctccaattgcgattgcgattgcaccaaaaaaaaaaaaaaaagcaaagctagacaatggaatgtcgcgcaacatctacatccatatatccaaacgccgaaacagagagggacgatacgcactgcaatccgaccaaactaaacgtcaaaagcgccatcctcgtagactgattccgacccttgatggagggcgtccccgcccatcgcgcagcctgcggcatcctgattatccacgcgctagcacgcactcaacaggtccgcgctcatgcacctgcacctgcaccaaacccagagtacgctaatgacggcccagccagtgacagaataccgattaccgattcgaaagtcgaaagcgccagacaggaagctcgtcgcgacgcgcaattgagaatcagacaaatatgtagaacgtgcgatgcagcagttcaggttcaggtgcagtccgggaatacgttccgaggaccaagaaaggggccggcagtagtccgctcgtatcggagaattaggaattgagtcgcgtgctcttttcggggtcagctcgcggggggccgaaacagcgcacggtacgtcgcgggttcgtcgcgactcgcttgttgacggcgcggagagcggggaggatgcgtgggttgctccggggtcgtcggtgggcgtctatgtcgtcgaaaggcgcctatggtggatttcagaaagacgttgaacagttcgaaggagaaggagagaaaatcggcgttggcctgagcgcaacgcctctatgcgggccccggccttatcgatttgattaatttacgagacagacccgctgggcttcaagcccttctgcagatccgggcttttttgttacgacagctagggtcgagggcgttttatttgttgtctgtgtacgggttctgtttccactttcaatgctttaggtttctttgctctccagttattgttgtttgcagccaagggctgggtcgccttatgtcagcctctgggatggaccctttgtcgctgattggcccgtgtggtgacgtaactcagggccctgtgcgccaattttagaaacacaggggaattatacgaagatatacgaagacacgggatatgacaatgtgcaatgtacgtgcattgggcaaaagagctacaggggctaatttgatatcgcttacctgacaggtgtacttttgctctacgctgtacatattgaaaaaaagatagaaatatgtggatgacagctaatcttatagcaatcccaagataaagggacatatccaccgaacaaaataagggcgtaagtatctttcttgcgttgcatccaattctaatatcgaattggtctcgaaaacctaagtatcacagtatgacgcgactcctgcctgccggccgaccaaccaaccagagtcagaaaatagagattttaattcctttgtatcccaatccgcttcccataatcatcgtaaacagctatagtccgaaaacctacagccggttgggggccgaggtggtgacgggccactggtagccagcggcgtcgctgaacttgtagccgtatgaagcagtgaagtcatcaagaacggcgggtccacgggagcctggaacgtgaattagctagagttagaaaagaacgaagagggaaaactcaccgtaggggtactccatggggatgatctccttgttgtcatccaagtagtgcaggagaggagtgaagatacgccagctggcatccaactcatcgtcacggacaaagttggagtggtcgcccttgaaggcgtccagaatcagggactcgtaggcctcggggatcttaaggtcggagaagcgacggcggtaggtcaagtccagctcggtaaccactgtctgcatggagagaccgggcagcttggagttcatcttaatatagacggactcgttgggctgaacacggatgacaagctcgttacggggaatgtccttgaagataccggaagtgacatccttgaactggatgcggacctcggtcttctgctcgttcagggcctttccggccttgaggatgaagggaacgccgtcccaacgctcattcttaatgtatgcaaccagagcgcagaaagtcgggcaacgtgaatccttaggcacagtatcgtcctcgaggtaaccgggcttgctgccttcgagggagcggccgtactggccgatgatgacgttcttgggctcaatggcgtccatagcgcgaaggacacggaccttctcatcacggatatcctcggaagagaaggaaatggggcgctccatggcgagcagtgtgagaacctgcagcaggtctatcaaaatgttagcatctttctatatctattcagtatgatgaatgacttacggttctgcataacatcacggataataccgaactcatcaaagtagccgccacggccctcggtgccgaaaggctccttgaatgtaatctgtagccggtattagaaccggaactccggactgagatcgcttcacatacctgaacgttatcgatgtggcggcggttccatgtagcgttgaagaactcgttgccgaatcgcagaataagaatgttcttgaccatctccttaccaaggtagtgatcaatacggaagatctcctcctccttccagttaggctccaaagccttctggaggtcgcgcgagctctgtaggtcctttccgaagggtttctcgacctataagaaagagtaggcgtatcaatatggggttcgttctagccagcttgtcccgagaaactcacaataatgcgagcgaggcctctcttaggatagcagttgcgcttcagctgctcggacacggtggtgaagacactgggtggcagtgccatgtagaacacgcggttctgctccttcgattggcgtttgttctcgatctcctcaaggtgcttgttcaggttgataaaacaatcatcttgatcatattggccggaaacgtaggaacacatcttgcagaactgacctaattgatcctcaacctcctttgtgggaatcttgatgtacgagcgaacgcgcttgaggtactcgtcgtggtccatctttgtccgcgcatatccgacgatatgaatgtccttgggcaggaatttgttgcggaactaggtcatacttgtcagtggataaccggtggatgctcagtagaaatagcacatacaaggccaaagagtgcagggaactataagctggtcagtacgtcaagagtcatcaccacctatggaaggggtacgcacggtcttcttcttcgccagatcaccggatgcgcctagtaccacgatgatggtatcatctttaagttcgacggtgctgaatgccatctccattgtcagtgttgcgtttaattgaccgagaaagaattttgcattggacgcggaatcgaggggttgagcgggggagctctctgggcacagaaattctgcagaagcgttccagggagggatcgactatggggaagaaggcaataacgtccacaatagcacaatgttgaggggataagttgaggttgaattgagctggaggcagccggtgggcttccgcaaccgtggaaagagtgatgtcagagacgcaagaggggaaactcacccagcaccatggcggtcatcggttttgttaatcacagacatcttgcaccaaccgcctaatacacaaagtgaagaagaagagtcgagcggagtttaaagagaaagagaaatattgtagagaactccaacaggaccggagtacttttttaaggaagttactcacacagcttcggctggtggggctttggctgggtattgatgtattttatgacttcaaatacaaaatggttttgagtaatctacttgattctgatatttaccatgactatttcgatgccgacctaccctagcctcgtggcgaattcagtcaattttcttatatcaagttctttctgacagatcttcatggtcattctgactgaaatctagcccggagcttacccgtgatgactatcaaccccacgcctactatcagtctatacaacatacagaactgattcggcctcggggtaatacaaagtacctcgggtcaattgtcgataatatcggacatgagcctgccgctaattcttattctaataacagatctagaggtcatctgataagaagtgcggtttactcctaaatgcggatctatataaagaggctaaattcgaagatagagtaagacgtgtccataacactgtcctatatttatgttaatagtgtaagtagttactccggagttactccgtactgttagttatagtatgcacaactttgcggtctaccccgtataccctcgtatagtatgcatgtatgttgtattcaaagcggagcagagaagctatcgcatcagggtaaggttgcagtgtccactaaaatccttcagtgtatctaacgaaagtactgcgtaccaaacacaatacaataccttcgagcacgcaacttgataagccttcgttgtaccggtgacccaaatcgtgggggatggatcggcaggttggtcatttggacttttggacccagacggattctgttttcccgcgagaggccactttcttaagtccggtttgggactggtattaaccccatctcgaattcttcccaatccggaacatactattaaccgttgctacttagggctatacgaatattatacgaccctatctacactctacgcgatctgttgtctctcggtctcttgaaaattgtccaagttttcatgaatacatccatggatacatacggtcccaaatgtaatcgcggtggggcaggatacaggaacttctagatttcccaatcagtggtctcggtctgggtgaagtatatgatggaccggaacgctacccggatcatgtcactgtcactggtgatcagttggagatatgattgtttcgatgttgtcaaggacactggctaggttggataaaaacaattattcactccctagacctgccgacaataccctctgcaatttgctttttcctggatgaaaccttccaactttgaaggttggaaccctgtcgtcatggctggagtttgtcagctgggaagctccaggcttgaagcttggacgtgtcgttcggactactgtagcccgagtggcagtggaaagtacaggcggtaaatggtcggtaaatgacctcgagggcgcggagcggagaaacaagaatccccaagcttatctcatctcagattttgcctatctaatcgctgatgtaatagagcggtgtggcaatcacgggatctcgcttagccctgatgcgtcacgtggtcggtggctcgctaagatcccgtttgggctagggcgaaaaccaacacacggctgcccaaattgattgtgcgcctgactctatcgaagcgacgacaaccacgacaaacgggaacgacttttgatcttgcgggtcattccttcgactttctttccttgcccgctccccacagaaacgccgacacaatgccttcggaacaaggacaccgccgtgagtgaatccctcgatgtcttatcgatcgtcgttttggcggtctcgaaatcgcaaagccgcattatgagcaggcacattgtgtggtcgcacactggataaaagacatatatgctaacgatttcttcttttctagtctacgtcaagtaagttaccaccgcacttttatcgcattcaaggatacaccagttcgacatggaggaccgatttgggggacccaagacatcgccactcaaatcgaagcaccatacgatatgaacagagaattaatacgagtttctttttacaggggacgtcacctgagcttccagcgcagcaagcacgccctcacccccaacaccaggtatctacaccctgcgcacccaaattgaatgctcggatggaaatctgatatatggttatacagcttgatcaagattgagggtgttgatgacactaagtccgccaagttctacctcggcaagaaggtcgctttcgtttaccgtgctaagcgtgaggtccgcggctccaacattcgggtgatctggggcaaggtcacccggtcgcacggtacgtgaatacaacagacagttccatggccatattcgaatggtcctctgggagaaacctcgaactcgaatttcctgtatctgactctttccaggcaactccggtgttgtgcgcgccaagttccgcaacaacctcccccccaagtccctcggcgccaccgtccgtgtcatgctctacccctccaacatctaaacggcttctttgtgttgttttcagtgggcgattcccttcttcgcacagacggtcggtcaggcaaggaaaagtcgacggaacgagccgatgttgatttgaggtgatggagttggcgggtggataacgttttgttcatgggagaaggcagggccaacaaagccctacgaatcaaaaaattacactttcatagctgtgtcggcccaagatactgggaacgagcttcgtctcgatatttctccttgttcttacaattggcgagcatgatgtgtctggtcgcgcagcgtcacttctcccattttgtatctgacgcttaaacgcaccaaattccataccatttcaaatttcaacagaccggtcaatcgatccgcttcttcgtgcgtccggcttccgtttttttgttctagaagaaattgcatttctgctctggctccaaattaccatggcattgttgcgaattgttgcgaatataattatactccatggcaacagataaacagacaaacagctcgtattcaaaatcagtagctctagcactaagcctgtgtggctagatccctaggttgatgtggatacccatgtcgaactattatatatcgattcgaggttataattctacgatgtaaagcaaaatcccaccgatattctcctttttattgtctcaataaacccacaagaaaaagatgtacaaattatataggccaacataaaacccgatccgaactccactttagccgaagtatatatctccaagtatgcaaaacaaaccaagtatcctaaaccgaaatgcccaacaccaaaattccatcataaatcttacaaactctccttatgaaccgcctgaatatgcgccttcaaattctcctgtcgactcgaagcatggggacaccgcggacacttgaaagcgcgcggagtgacatgcagagtctcgatgtgtcgcatgagcactcccttgtgcgagaaaaaacggtcatatcgacagccctcccatttgcattcgaaagtcccgtgatcattgccacccctggatgaagcgaaacacgtttagaacattgattacgatagtccttggaaagaagaaaacgaaaatacatacttcttcttggctgcagggccacgggattgacacggcattttcgtctggctaggctctatgctggcatcatcctgccgaagcggctcgtttattataggtgccgagacggggagatcatcccatctggtgccgtacaggcttgctggggagtgtacggcggtggttgcttgggatgaaatggatgtcgggctgtgattggtagaccggctgtgattggtagaccggctgtgattggtagaccggctgatggtgcctgggtttagatataatggggagggagtgagagagagtattctgctggggataaccggtgtagaggggaaacatgaggaggcaaaggggggctgtgccgagggaggttgcagctgatagttgtatgaaagaggttgaggggtgatcgctctcgtggtgagcgatggatcagtggatggagaggtgagaagatactcgtctgtccaatcccttaaggcaatgtcagaccacggaaattcggactccgagatacttgggatgttgttgcgtgttggccacgccatcttgcgtacaatcaccgatctgggtctggatgtagagagtaagcgttggggaggcagagacaagatctagaaaatgctgagtgagtgtcttgagccgatgcagcatggagtatttatgaaatccgagccgatgtgaattgtggtatgcagcggtcaacttcactcgacgtcacacagttgggagacgacacctataaaaaaggcctggggaaagtggcgcaaccagttcggccaaaccctaggtttgtactagaaaacctggcttagatcctataacgccaggatctagatccttgcatcgactccagcttcacatcagatgagacaaacgcaacctccacgaaaccatatgatcgtggcgtttttagcgggctgagcataaatccccgggtttctgggctctcaggctccttggcagggaactcatcatttttattggtgaattcttagtatccgtttcagaaagtttctagtatgttgggaacaaaagcgacagaaggattactatcatttgaaagtattatcatgctgcaagccgtggccaaccgtaccaataggatgaggttgcagccaggctgactgggaatatacgagagatcggcacattatgatgtctattctcatattttccctattcaccgtactatttcccgttccttttttttcatgcagccggcccatgacaatggcaatggaagatatatccggaaagcctaaccgtctactgacagggatcggggtttcattagcacttggggcagttgaaagtattaaagttaagatattatcactatttattccagggactctaatttagctgtagccatagcataacgagagaccaaagatccgactttctgtaaagttagggttacaggaactgtgcaggacgccggtacatacatctactgacccgatttcgtatcccgggatatccccaaaataatagagaaatcctcgaatattagggttaagcactgagtgtgacgcttgtacatacatacactcgatgtggcgcagtttaattgcatgagccgacccgatttcctgcctaatctcatcatttcttactcccaacgagaatatatacgaggctgtgtctatgcgttgacatctacaactgttacttgccagatgttcccaataaagagtggattcgttgagttttatatggatactggtagacaaaaaccgccgtacacgtccaggggcgagggttgggataacatcaccacacaaacaagagagccaatttccttgcgacctaccaaacgcacgaccaaattccaccataagaaagcagtaagactggaattggcctgaaagggcagacgaacaagttgcaatgcaaagggcgcagcaaggttcctggcggttgcctttggttgccttaccaatgatatcaaggctaaggtgatggctgaaatgggtccacacctccatgcttatcctgaccagaaaaagggcggaagcatctgtttcgtaggtgtcaacaagcttgacgcccagatggcccgggagattttgaatgatctcctgaaactcctttgtcgcgtccttgtgtcgaccatcgagagttagactgacaaggatattcttgtcgcgaggggccgctctggtagcgacatgggattctgcttaccgggtgatgttgctcttttcacaaacgccggggcgattgggtgtgacccaccctcctaaggagtgataaccatgttacgcgccgggcttttataaagaaaagagtgcactctaacgagaacactaaacatggggaagagaaagaaagaaaacggaactcaggacaatggtggggtccttatgcccctgcgggctttgccatactctcgcttgtccattgggaaagaatgacttcccccggaaaggaaggaacgatcgaccaacgacctcaaatgagtcccgatcatgataccctaggggaatatctgggcgctgttccctagaagcccggcgcctgagcgatgtctttgaagactcgatatactgggtcgggataggttgtccctttgttcggctcatcggggggagggagtgactaccttggccaagctctgaatcagctatggctccattcgcgtgctcttcggtagcttgaccaaagcgtcgaattgaggctgcatctttcgattctaaaacgcctttcatctcaggtccgtggtctcattccaggatatcttctgcaagtctcaaggttcttggctcttgctggtccaattctccgcgaaacccaaggggtcaaaatgtccgaaaaacagggcgtgaccggggggaaaccgggttcttgcatgtgctgaagctattgattttttctttggctttgggctcaggagcccgacgatagatctttcctttctaagagggatggtgcttccaagaacaagtctgccactgttgaaattgaccttgactcccacgccgcattgttatttgccatctgcgtgacggcagtggatttatttgccggtcaccacgcgagctccgtatttcttggccgggccctaacgagggcgaatccgtccatagaatcggatcggtgaagccagcggtttggaccatccatgaaagagtcgcagagagtgatttcagatgagatgaaggttgatattgaccagcaagggaccagggattggacagacaaagtatctctcttgatcaccggaaggagtcatgttggcttatccctagcaaaacaaagcctaccagcaggctgaaacagtgatacaaaaagatgttgattttctcactctctccaatccctgatcctggcgagcaataagttacaggcccgatgaagtttgtgcccacacctcatgtacctacgcggtaacatccttcttccaggtgttcttccaggccttcgaatttgcaccaccactagcaggcactcgccgatgatgacctggtccttcacaagaatggatccctcgaataccaggcaaacagccaccagttgagttccaggccccgttttctctcgaatcacgctgccgtgcctccgtaccacggagctgatgaaatttccacccttgttcgtgcatccgatggtctgaaacacgctgctatagtcctcggctgtctccattagggacgatgtggctatagtaactgtgcgtattcaaacccagggtgccatgattgattgcttgtggtgagaagggaaacagtcgtggtgccgggagctgatgaacaggtcgattttccagtccataccatagtaccacgatttcgaacccctgccttgactccgacgatagcgaacttctcggggaagttagtctgctataacgatagccttcatatcggtaccaatgctatctcccgccaacgcctgcgctggtgctcggttcgagcttaccaagtgacgaagccttctccaaaagaatctgaccggacgtccacgattgcaggagagcctcatgaccatctatccacccgtgtgtgcagccatcactttgtcactgaagaatgccttattgggcgacgagcgaaacggagacaggagacaatgcacatcgggtggatgtactacaagggagttcagaagccaaagtaatgattcgttcaccacttgctcgtcttttgtttcttctccgcgatctccacatcggccgcagctgcagcggaaacaacggatcacttgctgtagctgcgacttccgactctagcgtcatgcacgcacttgtgggtgatgctggtgacaaacgcatggatgaaaagtctcccatcatgcggtgtcgtcgacaatcaaggagaaggtcatgttctgcgaaccacattcatccaaggatcaagtcgtgtcttcctgggtctgcaaacagtatgtgatgttgctgtttgatagggtgagaatgatagcgtgcgtgctcacgtccaatatatagcgtatggataagcatcaggtcttgggcttgaactgcagctgtcgagttattgtcagttgaggccaaatattagacagcaaaattattcaggacgtaccatgggtatcatatggtgatagatgcatccgcccatcccctattagaaggaggggaagaccggacattgttgcagttcttgcgttgattcttttcccgatcattgtgaaaggaatccgcggcaatatttggaggaaggctgagtataatgataaaatataggaatcaaagccgagaagtcattgatcaaagttctcattgtatttatcaggcgatcggggggtgagaattccatgaggcataagagaccagataaccatgaaagagaagtgagagagatatacccagaaatcgaggctcaagagaaacctgcctgctgatgacctgaaacgaccagcatcgtatctcgagacccaagtagcttggagatataacggtgaagtgaaagaggaagaaccgtgattgagctcggctgatgcgaggagggggggatgggggagagacgtgactattgctttgattgtttgtgtttgggccgtttgaaagcatttgacaaaaattcacaatgtccagctgttgctgtctcttttgcgggaatggcatctcggtgtctagcaaacccgctttctggggggtttacaaaaatcgatgaacagcctcaccattaaggctaattgctgggcgtccaccagtgcatggtggttacggcccgagagatgaggcataaacaggcttcaacaaggtataagaaaggctggaggtgtaaatcagtgtgctgtatgggagagaaagggggtcagaagttgttgaataactcacttttataattatagagaatttcctcggtataagtcaaaaattggtggtcatctctatatcgcatatcttcaagatcgcctataccaagcaatatagcagcagttgtatggtttggggcgacttcaatccttggagaagggaggttgaaacgccaccaacccgagtacatttggttcgtgacggtccaaactgccagattggcgagcaaccataggttggaggtgaactgagaatcgtaagatcctatactacaggagggctgttgaatgcccaagataatataatataatataacatggatgtgcagtttccatgagttgaaacttctaagatattgtcatgtacttatacagctgacaccaggggcaaatggagcttgataaagaagacacagtgatcaaacctggtatagaattatatagattttggtgggttggctttatttattatacataaaggctcaatttgcatcatgactcatatcaaacagtaacaaagaacaactccatggcaacccaagtgagaggcattgcgactgtaataaaaattaaatagatatgcattaacttttaaggagaatgtgtgctaagtaacactcgcggacggggaattagtaaggtatccagagggagagagattaggcctcgatttctggcttcgagtcagcctttcgctgagagtcgataagctcctggcgggcacgctcttgctcagcaagaccggtcttctggacggtgtgatggcgggtcagctcacggcggcgaactaacaaagcgagaacgaagccaaggcaagcgatggcggtgtagaagatccacatgcggttcagggcatgtgtgaaggcttccataacgacattgcgctgggagggagtaagcctcttgataagggcctttgaagagctgctaaaggaggcagaaacaattgcagcgtcttcagcgcctagggcggcgatgagcttggctgattgttggctcatgatgttttggtaaatgacagtgcccagaacaacagacatggaagtggaaagttgacggacaaagccgaaagtggctgttgccgtggccatgtcggcagggcggatgttggcttggaaagcgaccaaaggtgcctggaaattaggaccaataccgataccagtgattaactggtagatgatgatacggggccatgaagcgtaggccttgaggtcaatgaaaagtccgaatccaagagacatcaaggtcataccgccgatgatcagctcgcggaagcgaccagtcttcttcataacgacacccgtggccgcggagccgattgcaagagacaacaccagaggcaggacatacacaccactcagaatgggagtcgcttggaggactgtttggaagtaaagcggcagatagtaggtagcggcgatgaaagcgaagccgtggcagaaacaaacgagcaggatgagaatgttgtaccactcgttgaacagtcgcgggggaatgattgggaacttggcaaccttccattccaggaacattgccagagcccaagttaacacaccgaagacaattagacagatgacagtaggtgaggcccaggggtagttgacacctccgaactccaggccgaagaggaacatcagcgtcccgccgatgatcaagaacgttcctgtccaatcaatgcagcgcagaccagcccagaatggagtcttgggcgattcaatgtgaaggaagaggacaaggatagcaagcgagacacctccaaccggaaggttgagatagaaacaccagcgccaagtcacttccgtcgtgaaagctccgccaataacaggaccaagagcgcctgcgacggcccaggttgcaccgaaaagaccatagtacatcggacgatctctgtatacaagttagcctcgttgcatcccagaccaagaagtcatatcatacctcaagctgaagagatccgaaacactgatattagccaggataatgataccaccaccaccgacaccctgaaccgctcgaccagcgataatcgtggccatattatgcgccaaagcgcagatcagactgccaaccaggaagacaacatttgccaagacaatgatagactttcttccccagatatcactgatcttaccccacagagggatacaggcggcattcgccagaagatatgacgatgcgatccatgagaaaccgctctccgaggcaccaaactgcgcggcaatagtgggaagggcggtggaaataatagtctgcaagatcaacgttaatgaccgaagcaaggggaatcaagtgagcatacacataccatatccaaagctgccaagaatagagccaactaaatacgacatcaaattagctttctgcacttcacgaagtttccccgcctcggagggtttcttacacatagcgccatcatcacgacaatgatctttttcttgcccatttttgctgcctgggagggtgcgtggtctagaggcgcaccctctgttgtcttttccgtcaaattctcatcgttgtgttggccagctacctcagttacctggtcgggggtatcgggggacttttccgtgtggggttgatcgatttcagtattactgctcgaggcgtctggttgctggcgctcactcatcatgatttgtgggggaaaagaaagggagaaaaggtttctagaaagaaacggcgttaagagtccgttccgtccaagctaagaaatgtccgaccgcggaaaatattttttggctgctagaacggtagaatcgatatgatacatatattataaaggggtcatcggatctcgtattttcggggtttcaaagttgaaaggcgaggccgaagtactaaattgtcgaatccagtggatcgtcggtgtcggcgctcggataagccccgatgccgagcttcagggcttgtttttacgaaaacgtgagtcattggttagacatcttgttttacgagggccaaaaatggacaaatatatttctaacatatcgctgttggatggggtggaggctgatcgcccttgttgtcaatttgaagtggccatctccctgatcttcgacgatagagacatagtataaaggagaatacttgcggagaaatatctacgatgggaccaatgcggtgcgaagaacacgtggttgtcatttgagagagagccagctcgcagctcatgcagagagcctgaccgactttcagatttaattagaacaaagtgcaaaccatcagaatcaactcgcaaccacgtgagataggcagctggcagcccctagtcatatctcgacacgacacaataacgatgcggtccatgagaaaccgctcacagagaagacccaccatttaatcacggcctccactggccaactcagagagccattgccgatgttgaacatgagccaaagcagcgaagtagtctgagagctcgtggaattgtagttggaagcgtttctttagagccagtggattgcatctgggaaatctcagaccatgcgatttcgatggcgatggcgggaataatgcgaattattaagaattgaaagagtgttccaatatcgtgtccatggccttccccgggaatacgtaatggaatcactccacgccgcttcgttttaagcggcaaccgtagctttggatactcgcatgacgctgccctgatctataggctatagcttcaatgtccgcgaaattgaagacgggagcggtaagacttgaggcagccaaagcttggaatctgacgttaataattcgctcgtgggtttgtgagttgtgtgtataaatatcagcacacggacgatagccatggaattccgcggatgtcgcgcattggaaagggtgtagaagatatattccttggggaagccacgaacggtaactcggagggcctgtctttgacaccttgattctcacatttggtgacccaggagagttcgcgtcgaatgcgatttataagtatcaaaaggcgcctaaccctaacgttagtcgctcatcgcgttcttggggcctcaagatgatgccaaactgcatagcactggaggtacggagtaactacgcgagatcttggttatcggcggggccagagatgacgctagacctaaaagaggttagcgtagctttcatgtgggaataggtcgggcctctacgtatcgtaagcttctaaggttgcgatgcgtgatgacaatctcaccgtccaaggcccccagggctccctcaccttcgattctaactcgagtccagcactcagcttgggccatcttcagtgcggagctcatcttcaatcatggtacacattcagagccttcccatagagctcctagatctcattgtctcttttgtccgcccagatgatgagcttccgagcagagatcgaagaatgaaagacgatattgaaactctgcgtaatgtttgcctagtttcgcggaagttctatgccctgggccagccgttactcttccgtgttcttttttatgatggttcgcatgattatcgaatgtttaccagaacaatttgtcgtcgtccagatcttgcaaagcatgtgcatcagatctgcatactgcctaccctatccttcggtacccaccttcttgacgcagaagacctcgagctgtccaaaggcataatcgaggaccttcagttgggcgatcaggaggacacatggatttcgtctatagagggagccgacctcggccttttcacagcattagtagccagcaaagcccccaatcttcgctggctacatctgccagtatcccaattctggattcagccattcatccagctattccgccacaatcctgaatttttgtcaaaccttgagtctatctggattgaaagcgatgaagaatattgcaacacggagatgtattccagaatgaacattgcttcctatgagaaattcctcacccttcccaaggtcaaatcttcgacctttgagtacggtgttctctgcgacgcttaccttcgtccgttcccatcttcctggctgcctggaacattggagacggaaagactggcctttcaccactgccaggtcgatcctttcgccctcgaaaagctcatgcaagcgtgcaagaagctaaaagccttcacctacaacaatttcagcttgcacccgaacaaccgacgaaatcgtgcggaaaaactgcccgagttcaacgctaagcaggcctacgaagccgtcctcctacacaaggacactctcgagctcttccacctggagtacggaacgaaaccaccgcatattgatatcttcgagcaagtcctttctggccgcgtccaggttggctcattccgcgatttctccgtgctcgagaccatcgtcatcacacacgcttttcttccaccacaccccgaattccccagctcgttaaagacactccatatcatgaactgcaaggcatctgtctgggaattgacgcagagcatcgcgaaagattgtgaaaatggtctttatccggagttgactgatgtcagcgtattcgcaaccgacatcacaaagcctgctaagcttcaaggaaaacccctacagcaatgtctccttgatctagaggagatgttcaaaggaaccaaagtgaatttccaaatctcaccgtatgaaataccttattctgatgattacgataatctcgacctctatcgttcttacactgctcaggaatgatgatgtattgttctactacggcagccgtttttaaaatggcagccgggccacatatcgactagcattatgatcgagttcggttatgaggaagatttccaagaacccgccaagagcgaatcccagctggatgcaatccgaccacatgttttggattgcttatggagcgggctagggtggacactaagcctcgatgagatcatttataacaatacatgggaaacagacagtaacgaaagctcgatcgtctagtccagttactccagccattgattctgttataatatccacgataatattccttatcatgtaataatatctctgaccgaccatgtgagttttaacattttttgagggacgagtgtatgccttatttggagagatggccaatacttgggaaatctcaatgcattcatgttccacgcatattcgtggctcgatgattcctcgatgaacatgtattggccagtgttctggaaattctatgacaaaagcaaattggggtttgggtataatgaaaagagccagagcgtagagagaacatcacgactaggaaaaggaaatcgagagtaccacgtatggtaatggagcagaatgctttactcctgcaatagaagaatctctgtaaaaagcgatttccagttagccactgatccccaacaacacaacagacaccaaaacctaccagtcaaagcttcttcaaagcttagggtgatatacccatcccgatcatcatcataccgcttgaacacatccgtcatacgcttcagactgatacaagcctgaacgaaaagatcaaagctcataccagtagacctgtagtccttaggcgcattgctcatctgcttagccttggcttcaaagacaccaaagataacagaaatgaacttcccgctaagacgatatccgaacgcaacaagcgcgttctcgaactcccgctggctgatgcgtccactgcggtcttcgtcaaagcgatcgaacagctcccgccatgcagccagataccgccacagtgagacaaactcgtcgaagttgatggtcccactgccgtcgcggtcgaacatccggatcatcagcctgaccgtccgcgggtggaaggacgtgtagtcgccgttcacgagcgcgctgccgagctccccttcggtgagggtgccggagtgggacgcgttcgcggcgcggaagagggggaagagttgttgcgggtcatcgctgggtgctgtcaatggcggtggggcgggcgattggggaggccgcgatgagggcgggggtcggttgcgctgggggtgtactggtggggggccgaacccgtagttctggggtggcggggaggggtggagggggtgaggacgagactgggactggctgaagtgttgacttggcgggggcgcgtttgttgccgaggggcggccgctgtaggagttggagtgggagtgggagtggtaaggctgggaatcaaggcgtggaggcgcggaggcgtatgcgtgctggggagcgctagagctggatacaggaacacgtggagggacaccgctgtgggttccttgcggtgacgggcgagatgggagcggtttttgggtgtgactcggagtgtggcctgatacactcatgttgcttaacatctgcgccgcctaattgagggttaacgaaaggagtctaaggcgtgtaacagatgttgtacctcttctggctcagcatgactaatatttcccaagtcagtaatcagtagctgcagaagatgcctagagtatgcacttacgctggcagcgcgtcggggttgtaggatttgttgtaggccatagtcggagcgctggaggtgacacaatcaagagaaagaatgcgacacaggaagtgcaaaggtatatgaagaagaagaagaataaaaggaggcacctgaaagcggagccgggggggggcattgatttttagcgcatgtgaggaaccttgtcggaggaactgcggagggtacatgacgaattgagagctacatattggtttagagggtttatactgtcgagtttatgaatatttttagtatatgagatagctagagacacctacatataagcagactgtttctattgattttgttcaatataggtccatggatttgccaggaagaaccttggaatacctgcttcactatgaggctctgctttaaaattaacaaaaacatatccaaactacggagtacatgaatctatcgaattaacgcccctagatccacctagccagcgctatgttagaactaatacgaatacgagtttcgagaagtgcgtggtttctattccggacccctcaatatacagcgcagaactcgaatccccgcgctaatacgtatagtacgggtgtaccgcttgcattgtaggtttggatagtattagagagacgagtctacaaatttcaggggcgaaatacgcgacgtaactgagattggaagaggctgagttgtgtgcccaacttgaacgccccgctccactctatggcgtacggagtacagatatccaccgcgttcacttaaccactacagaccttcaatgacagcatgctctcgcttgacggcacgctataatggatcctacttcaatgatgtcactttttgctatcacgagatagctctttatagtgcgctttcctaatgtagaacaggctaaagcgagatgggacttcggaaatttggaatttaagagaccaatgagagctaaccacttctagatatataatctatgacttctcttctcattgacttatgtgatgtgtatattatactggatataattcagttgcgggtcattgcctatatctgactacgactgctgtatattctatattgtaaacaggaagtaagcttgaaagatttcatttctcatttctcagttaacgttagcagggtatctcaaaggcaagaacgcttgatattctgcaaaaatgcgctaggcgcatgaacaaaccactcctcggtcgaacctcgttggcttgtcgtcggcgtcgtgaaatttaaacgccctggtacaggccacgagcgacgagggacacctccggtgcttgctcctcgagcacggcgatgatctcctcccaagccttctgctggagttcctcgccctctaggatagtagtcagcgcagtcgactcactataaaatcattagcaatggtcaattgaaacagggtgaaagatgatcttactcaagatatccctcactgcgccagcatttcccctgcgattcgaggccctggagggtagcactgaccagcgaacggcttccctgctcagtagtacgggcgaaaaacgtgtgcataacccaaacgatacacttctcccaccaatgagaatacttgcgacccaaagccgagatgcacagtccggggctgacagtgttgacaaccagagtgtgagtgccgtcgtcgttgcacacgatattggcgattttcttgatcacgatttcgagcagaagcttcgaaatgccgtactgcttgggaccgttgaagttgtccgggtcgttgacgtgagcgaggatcgagccatcggtctggatgcttgcgggcttgacgcgaacgaattgctggctggaaacgagagttaggtgggtggggttatcgacgtaggagcttttctttagcttaggaagtagaagtatggccaacatcaaggtcgacagggtgttgacctgtagggtctcctcccagccctcgggggactgatagtattcgcgattccaaagtccagcgttaagcaacgcgacgtcaacacggtccaactcgacatggacgcgttcggcgaagtctttgacgctctggaagctgttcatctcgagctgccacactttgactacgttgcgtcggttcgtggctcgttcgaggtcaactttggccttgttgccctttccgatgctgcgagatccgataatgagcaactcgacgccgagattgaggattttgatggctgcttcaaagccaaggccagaagtggcacctgtcaaaatgacgatcttaccagcgaaggacgcaccttgaggatcaaggggaggagtgtactgcatcttgaggaggcgaaagatggccgccatgatggaaattgggatgcaaaaggatggaagaataaatcaaagtaaacaaagtaccaagggtgcgaggcgcgtgatgaatgttttggggaagaaaaaaagccgataacaccagggccgataaaggatagcgataaagataagagataaggatacgattagtgcagatctaccaaggtacgaaagcggtgtataactatatccgtacacggacctcactgtaacatgtcaaataataggagtatgaataactgcagatcattttgccgagtatggttcgcctcttttgtgttgacccttaccatagtgcagatcatagacgccaaccttggaagatgaacaggaataacatgtcaccatttggactgttcattcggatccccaggaacttctcatatcgagcgatatcgagcgatatcgcgaggatgtttgagtcagcaagaatactagcaatgacggcaattctggacgcaatcttagataagatgtgtcggtgttcatgaaaatggaaccgacgatatagcacgaagatagaagcgagaagcactcgaggaactcgagttgacgttgcaacagacgcagtcgtttcggcatcgtgatattcccggacagagggcatgctcagcgtgccatctatcgcaatgccaatatctgtgctttcagaatcctatcctggtgattgattgtcttgatggccatagcatttgtgatattgaaattgttccaactgagctatatgatatcagaacattcaaggcacaggagtgagcccagcgagatcaaatcccattccagtgatgatatcgcggagagaagtgatgtcaaagctaaggcgatcagtgccctggcggctcgggtcaaccacgccgtcaaaaatgtcttctatggtcagcgaaataggcatttccaccgggccccgaaccaggaaaacctggttattccaggtcatttgtgccttgcccgtggcatttcggcatcagagttcgattgtactgcacactcctctcttacgctggaagaatctgataagaatgaccttgcgtacattgataccaacgccctctagccgaaatttcgcatcctataacaggcttgagtaggtttggttgaaaccaacctctatgaccacggttggttgatgggttgtcatagggaatgatgaatgtgttcggtttttttgatctccaaaataatttgaaatttttagaacttctttatgatgaactctttctggacacatgtgtatttgatcaagaagcgtaagaaggcaatttccaacctcctcggccacggaggttgagacaaggacgagtaaagtgactgggtgaagaatccaccagcttcaatggtactcaatgcctggtctgcttttttcttcagggtccttggccgaggtccacatcatcctcggtatcagaaccagactgatggactgaatttgcacccttagcaattcgtgggtgatgcttcaagagtggtgagaaggacaaggagaaggagaaagtgcgatgtcagcatatataatagctagctaccacgtgacccccaggataatatcatcatcttccctactatccctaggtaccagcgtaatagatatctcaaaaagcatctaaatagaccatcagattgatatgagaaggctattcttgtttactacgtgaaccagaagttaaagatgcaaaagataaggtagaatcaaagtgagccgatataccaagtccctgaagatatttcctctactctatatatagaccatctcacttgtatcgcatttgtacctcactggtacgttacatgtatctcaaatgttgtgctttgaaagtgttaagatgcctcatccatcacgcagatggcgagatgcccaagaacaaacaatgcaaacaaaatcagtgtataatcagtcttgggcaacttcaacattcagaacgttcacaattgtggtcaaatccaatttataacagcatcttctttagcaaagaattcaagtctctggttttcttttctgaagttgacgcgctgatcacagaaatcagccttaaagctgttgccggagcacattattaatccacctccgccagggcttggaaggtcggaatccgcagccaataaactcgttggagcgcatttaatatcgtctatttgatatggctgccattgcacaaggtcatcaggtccatccggacggtcgcacgtggaagagtcattttcctaagggtgatctttgggtatttggctatgggtgggttaactcattgtttcgaagttccattgagccgtcaaatatcaaatactgattatgattataggagcttgatctggaaaccgcctccacactatggtacgtgagactggaatgtaaaagtgcggcactaaaacgaaacatcgtgttggttgcttttgaccaagaatcaattgactaattataccatctagaccagcgtgtaccgggctatattaatggctatgttcggcgtttctggcaggtacgtgaacccgtcatttgaatgggagactttatatttgtacattcaagataaccagactaacattgtggttttccatcaattctaggccaggtatgtcgttgactatgtgcaatatgcagacatcgcaatgtaaacatgccgagaaccacaaatcgctaacttgatctcaaagtaccgatcaccgtggcacccccgagcaaccgggccgagtagtcaccgtaatcgagcgaagcttctgggaaaccctgaacgatccggtatgttttacatacgcctcttgttcatacactcattgatataacccctagctcgctcacctagaatctgaagctgcctccacaggcaaagtctggggtgcggcgtatcacatccctgcatctcatgccgaagaagtccatgactacctcgacgaacgggagatcgacgggtacagtgcgcactatacgccattccacccgaccgtggatgtcgaaggagccgcaggatcgaccgggccctctccaatcatttgcatggtctacatcggccagccgactaacccgcagttcctgcgtgaagcagctcagcgcgagccgcagaatgtggcgcaggttatcagtgctgggcatgggttgagcggcaagggttctgagtatttgttcttgttggagaaggctcttgagggtcttgggcttgggactgcggatgttcatgttacggatttggttaagagggttaaggctattgaggctgaggggcttgcggatgctgaggagaaggaggctggactgaaggttaccaggtctttggagggcgagggtgatgagtctgatcgtgagaatagccattgattgaggtgcatgggtcaaggctttgttggtgacttttgaagttttttgtttgcacatatataggttacatatttgcctagcacaatagatagatagcgaaagaagcgactggatagatgacatgggttctttttcctaaatataggggggggggggggggggggggtttgggtatattttnnnnnnnnnnnnnnnnnnnnnnnnnnnnnnnnnnnnnnnnnnnnnnnnnnnnnnnnnnnnnnnnnnnnnnnnnnnnnnnnnnnnnnnnnnnnnnnnnnnnnnnnnnnnnnnnnnnnnnnnnnnnnnnnnnnnnnnnnnnnnnnnnnnnnnnnnnnnnnnnnnnnnnnnnnnnnnnnnnnnnnnnnnnnnnnnnnnnnnnnnnnnnnnnnnnnnnnnnnnnnnnnnnnnnnnnnnnnnnnnnnnnnnnnnnnnnnnnnnnnnnnnnnnnnnnnnnnnnnnnnnnnnnnnnnnnnnnnnnnnnnnnnnnnnnnnnnnnnnnnnnnnnnnnnnnnnnnnnnnnnnnnnnnnnnnnnnnnnnnnnnnnnnnnnnnnnnnnnnnnnnnnnnnnnnnnnnnnnnnnnnnnnnnnnnnnnnnnnnnnnnnnnnnnnnnnnnnnnnnnnnnnnnnnnnnnnnnnnnnnnnnnnnnnnnnnnnnnnnnnnnnnnnnnnnnnnnnnnnnnnnnnnnnnnnnnnnnnnnnnnnnnnnnnnnnnnnnnnnnnnnnnnnnnnnnnnnnnnnnnnnnnnnnnnnnnnnnnnnnnnnnnnnnnnnnnnnnnnnnnnnnnnnnnnnnnnnnnnnnnnnnnnnnnnnnnnnnnnnnnnnnnnnnnnnnnnnnnnnnnnnnnnnnnnnnnnnnnnnnnnnnnnnnnnnnnnnnnnnnnnnnnnnnnnnnnnnnnnnnnnnnnnnnnnnnnnnnnnnnnnnnnnnnnnnnnnnnnnnnnnnnnnnnnnnnnnnnnnnnnnnnnnnnnnnnnnnnnnnnnnnnnnnnnnnnnnnnnnnnnnnnnnnnnnnnnnnnnnnnnnnnnnnnnnnnnnnnnnnnnnnnnnnnnnnnnnnnnnnnnnnnnnnnnnnnnnnnnnnnnnnnnnnnnnnnnnnnnnnnnnnnnnnnnnnnnnnnnnnnnnnnnnnnnnnnnnnnnnnnnnnnnnnnnnnnnnnnnnnnnnnnnnnnnnnnnnnnnnnnnnnnnnnnnnnnnnnnnnnnnnnnnnnnnnnnnnnnnnnnnnnnnnnnnnnnnnnnnnnnnnnnnnnnnnnnnnnnnnnnnnnnnnnnnnnnnnnnnnnnnnnnnnnnnnnnnnnnnnnnnnnnnnnnnnnnnnnnnnnnnnnnnnnnnnnnnnnnnnnnnnnnnnnnnnnnnnnnnnnnnnnnnnnnnnnnnnnnnnnnnnnnnnnnnnnnnnnnnnnnnnnnnnnnnnnnnnnnnnnnnnnnnnnnnnnnnnnnnnnnnnnnnnnnnnnnnnnnnnnnnnnnnnnnnnnnnnnnnnnnnnnnnnnnnnnnnnnnnnnnnnnnnnnnnnnnnnnnnnnnnnnnnnnnnnnnnnnnnnnnnnnnnnnnnnnnnnnnnnnnnnnnnnnnnnnnnnnnnnnnnnnnnnnnnnnnnnnnnnnnnnnnnnnnnnnnnnnnnnnnnnnnnnnnnnnnnnnnnnnnnnnnnnnnnnnnnnnnnnnnnnnnnnnnnnnnnnnnnnnnnnnnnnnnnnnnnnnnnnnnnnnnnnnnnnnnnnnnnnnnnnnnnnnnnnnnnnnnnnnnnnnnnnnnnnnnnnnnnnnnnnnnnnnnnnnnnnnnnnnnnnnnnnnnnnnnnnnnnnnnnnnnnnnnnnnnnnnnnnnnnnnnnnnnnnnnnnnnnnnnnnnnnnnnnnnnnnnnnnnnnnnnnnnnnnnnnnnnnnnnnnnnnnnnnnnnnnnnnnnnnnnnnnnnnnnnnnnnnnnnnnnnnnnnnnnnnnnnnnnnnnnnnnnnnnnnnnnnnnnnnnnnnnnnnnnnnnnnnnnnnnnnnnnnnnnnnnnnnnnnnnnnnnnnnnnnnnnnnnnnnnnnnnnnnnnnnnnnnnnnnnnnnnnnnnnnnnnnnnnnnnnnnnnnnnnnnnnnnnnnnnnnnnnnnnnnnnnnnnnnnnnnnnnnnnnnnnnnnnnnnnnnnnnnnnnnnnnnnnnnnnnnnnnnnnnnnnnnnnnnnnnnnnnnnnnnnnnnnnnnnnnnnnnnnnnnnnnnnnnnnnnnnnnnnnnnnnnnnnnnnnnnnnnnnnnnnnnnnnnnnnnnnnnnnnnnnnnnnnnnnnnnnnnnnnnnnnnnnnnnnnnnnnnnnnnnnnnnnnnnnnnnnnnnnnnnnnnnnnnnnnnnnnnnnnnnnnnnnnnnnnnnnnnnnnnnnnnnnnnnnnnnnnnnnnnnnnnnnnnnnnnnnnnnnnnnnnnnnnnnnnnnnnnnnnnnnnnnnnnnnnnnnnnnnnnnnnnnnnnnnnnnnnnnnnnnnnnnnnnnnnnnnnnnnnnnnnnnnnnnnnnnnnnnnnnnnnnnnnnnnnnnnnnnnnnnnnnnnnnnnnnnnnnnnnnnnnnnnnnnnnnnnnnnnnnnnnnnnnnnnnnnnnnnnnnnnnnnnnnnnnnnnnnnnnnnnnnnnnnnnnnnnnnnnnnnnnnnnnnnnnnnnnnnnnnnnnnnnnnnnnnnnnnnnnnnnnnnnnnnnnnnnnnnnnnnnnnnnnnnnnnnnnnnnnnnnnnnnnnnnnnnnnnnnnnnnnnnnnnnnnnnnnnnnnnnnnnnnnnnnnnnnnnnnnnnnnnnnnnnnnnnnnnnnnnnnnnnnnnnnnnnnnnnnnnnnnnnnnnnnnnnnnnnnnnnnnnnnnnnnnnnnnnnnnnnnnnnnnnnnnnnnnnnnnnnnnnnnnnnnnnnnnnnnnnnnnnnnnnnnnnnnnnnnnnnnnnnnggcgggggggggggggtagtgggctttggtataattctggttttgtccgatcttgttattgagtacattgaggctactattgcctgggcgggaataactgtttccataaagcaagggtgcccaacgggaattatttcgcatgtgtaaatggtcgcccaaaaaatggaacattgagtagtattagcaggcgatgtctgaatttgttccccggaaaaaacctcgtggttgtaatacatagttcagtccgatacccgtgacccttgctggacatacatgccatcgaatcactacccttgatctatgtactctgtcataggaaggatctgccgtgaaacgaaaataggcattgcagatatgaaaccacacaaagagagaaagaagacatcaaaagttcgtaggtgaaacaagtcgaaacgcaaccgtataaaagctcaaatctgcgttcattaaacaaattctcaaataataaacccatattcccttcctaagaagtcgagcgcgaaggaaaataacaatatcctgtaacaaaattcaatgggcaggaccccgccgtttcatctttcgccatattcgtttgtagatcgttacttcttttggaaagatttgccaaagaaaagcgcgtatgaagaaatcgaaaagaccccatcagctaatggtaaccctcttgaggagcctgctcgtggatgtttccgcgccaacctttggatgtcagttaatatcaggatcaagataccacaataactcacctccgccaccgccatacccagagtttgggccaccacctataattaattagcaaagcaacaagaaagaagaatcaaaaactaaccatagccgccgggaccagctacgccataaccagcgggaccgctaggagcgtagttgctgtacccacggttgtagggcccaccgtatccaccggcagcggcaggaccgttattgtacccgccgtgattgtgattgtagccaccgtaaacaccaccaccaccaccaccaccgtggtaactagattgaggctgggcattgtatccaccacgaccgtggaagccagcatcctggcgttgtgggcgatcaaacgccttgtcaacgcgaatgacccgcccgtcgaatctgaacaacatatgagatcttgaactcataaaatcaatgtgaggttggatggttactcttggttgttcatagcgcccatagcagcatccgcctcggcgtcagtagcaaagcgaacaaagccgaagccgcggctgcgcaaagtcgcacggtctttcacgacaatctgtactcatggtcagtagaagcccaagatgcatgtggtgtacatcagtcaagggagactgacggcttcttgaatctcgccgaatggttggaaaccctcgcgcaaggtgtcatcgctagtatgccaagaaaggccactaaatcccatcgcagcaacggttagactggctcctaccagcacaaatgtgttctcaggtatatatacacactgaataaaaagtttagacatcgtgttagaggtgtaagagaggaagctgtaagagagacgatgctcgagctggcttgatctgaggacggagatgaatgttgaaaaaaaggagacgaccgaaagaaaaggaaggataaaaatatgaacccgtccgaattgtgagacgacagggagatcctagcggctaagaggcgagtcagcatccagtcccgtgtaacaatcacactgcgttagggcttgcacattgccggggattttccactggtcggacgccaacggcaaagtccacaacgagtaatatctatttatgcgtactctgtgctgtgtctttgtctggaatcatgactagagcgagaaaggtccgggcttagcctcaagcgtacttccaagtgggggagggatgctgcagagataaacacgccaaagccagtctcacggccctaaaccttgagctgatacaattgcgggtcgtcgggtttccagcagtcaatcagatggtatccgatgctccgtttggattggcggcacttagggcaacggcttatgtacctttgttgcccctcacttggttgaagatccgagggattctgctttgggattcatagggctggactagcacctagattctattgtgaatctatgtactccatactgagtacatagttagtccatccttcttgctccgagaaccgggatatgagtccattgatgaaagcaacataatttcgggtggagtcttcacgcgtggactgtggaattttgtcgattccccgtagcttgctccatgcctgattggtcgtatgcgtgtttatgcattgtggacttttgtcctcattcggtcgggaatcatttgaggagtgtttggcaatacagacttgagatctgcattcaattaccaccgtggatctagcctctcagttcgggccatcgtcagtctcaaagtggctttgcgcgcgcgtgcatcgggcagagagggcagtgctccgtaggcccacatgcggcttgggccgtcggccttgtacttcatgtgccgggagagatcgcaaatggcgacgatcggcactgggattgcgtctatacgatgttgacatccgtctccgataggttgatgaaggtaggtatgggagaaaagtaccgaaaatgtttgaacaaaagctattcataggtgactcaaggaacacttctcatttaagcgccgagagagagcattaaagagcaataaatgggcattaatagaaaaacaaggaaaaacgaggaaacaatgaaaagacaggaggacgaacttgagatggtcgcgctttcttcggcggtgacttggatttgtgtgctttcaggtcaccttactctgtccagttgcttcaagtctactttatttctacaaacactacccagctctctgagttctgggaactttcttgatggaaagcaataatccaatctatcattggctttccactgttgcgagccagcaacaaagtcgccatcaagatggaggcatgttgttgtcacaaagaactatgaagtctccgcgctaacatagctttagctgagaacaaggaacaagcgaaggacacagctcctgtaacgagcataccgcaaacccgcatcccattcgagatatccgataatttgcgtgtgaatggacattcagccagtaggaagagagattcaggccacaagggaacgaaagcaccgtctacttacgagaccataccacgaagtgagagtcataagagatcacgacatagctacgagataaggtccagacacaagactcgcgaggctcgctatgagtataaaggcccatcatcggctgtggagacccagtcgcagtgtcgcaaaggaagaactaggaaatcccggggcaggaagcacaccatcaatgatgacttccatgccatcaatattacaggaaacagattgacagtaagtattgttctgcaacttctcgctggatgttactcatgccaaatagttgcgcaaaaacatgaacctgggtatgtttagtaagggacggtcttcgtgcataaccaaccaccccggaaataccccgtcaagcgctcttggaagaccaccaagcatcaagcctcataagtggaccgcagaatccgatcttgccttttccgagatgaactttctgtcccggaggaataatcccagcccgtatcccatgtcgaccgccagagacactctggatggacagaacgggagagagcaccacccacgagagctacagttcgcttaccctgcacatgactctagaatcaacaggtctcacttaggcaaccggtttcttgatgtggaacgccaacttgacgtcccagtcacgccgttgttcacatttgaaaaggcgccggtcagcgagatgtccgcagtttccggccactcttggggcacttcctccatgttccacaataaaagaagaaagacatcaaaacagtcatcatcaattccatacacctgggctgagactgaggtcgaccccacggaacaaatcgatgccctcgaacaacacctgctgagcctgctgcatgtcggggtatatccccaagcgctatgctctaatatcacaaatactgtctcggggagacggtattggagtctcgctgaattatgggaattgttgaaggagagaaaggcatcatggtcaaacgaagccggcaacaaaaagcgaacttcacccgaagccaacatggggcaggtagctgcatccgaagccgttccacaggagattcccgagatcgttgcatcagacactttggatcttgccaatgtcagcagtgtacaaaatgaaatatccgaacaatccccagattcgaatgtcgcttgcgaaacggtccgcagggtgaataacagaccacaacaacaacctccaattctcgaacaacaacaagaccgaccatgtcaagcttcagatagaccggactgtctaaaccaccaagttgccatgatatcaaacatcccagatcgatccatagatatctggggtgaagatcagtgcgagcctttctctcacgaatcgggagagcatgcagtattgtttcccgcatttgcaccggaggtcaaacagccgcatatatctgacattgaattttatgagctagatcgagttgatgatgatgatgagttctatcgcacgctggatgctgcttactgcgccatcgttcgccctgaggttgcggcaggagttgcatcaaacttacagcggtcacttgaatcccccgaacttggcaataatattccgaatagtccagaatcgactggcattcgagactatgatattcctacccgacaagcagaagcaggagaactagaacatctcgcaacggtctcccaggatatcatagaagagcggtatgatgagtggccagcgaagccttctcatcaaaacaaaccacccacgagtcattcgaactatcctggtgttgacccaaacaatgatatgccatggctcactactggatacggcaagccactaactgggaacgacgcgcaacagagtcagcacccagaaatacctgacttctggcgacagaacaaactctactgatcttcaccggcaaggtggttattaactggatagtcgaacgtgtcaatagcaagcttggccacatttgcatcaatcaaccatatcaaagcgaagtagcgccatcttcatgtacatacctcgctagcttgagttcggccgggaatagagattgtgagcaccttgaattcaagatagcattagggtaaccccccctccggacttgtatgatcagaccacacatgtattgtagtaacaaaacacattcccattgtcagacagaaattccagtatcgtgaagcccgaagcattcctacttcaaacgttccgaaattggcttcatggctccttcccaaaccttggaagttccccgtgtaaacaaagaaggcaaacaatgtaaactggaaggtgtgacattgatattgacagggcaggtgcacgagggacctgtcgcactccaggaaggcacgtgggtttggaatataaaaggacccttccccccatttctcttcttctcttcttcttctctcctccccatctctctggccaccatctctccgtccaccccccctcccctccccctccccttcccctcnnnnnnnnnnnnnnnnnnnnnnnnnnnnnnnnnnnnnnnnnnnnnnnnnnnnnnnnnnnnnnnnnnnnnnnnnnnnnnnnnnnnnnnnnnnnnnnnnnnnnnnnnnnnnnnnnnnnnnnnnnnnnnnnnnnnnnnnnnnnnnnnnnnnnnnnnnnnnnnnnnnnnnnnnnnnnnnnnnnnnnnnnnnnnnnnnnnnnnnnnnnnnnnnnnnnnnnnnnnnnnnnnnnnnnnnnnnnnnnnnnnnnnnnnnnnnnnnnnnnnnnnnnnnnnnnnnnnnnnnnnnnnnnnnnnnnnnnnnnnnnnnnnnnnnnnnnnnnnnnnnnnnnnnnnnnnnnnnnnnnnnnnnnnnnnnnnnnnnnnnnnnnnnnnnnnnctcatgctgcttaacctaccacagggatcataacattaccatgtttgttatgaggtctatgtaggtctgcatcaaataacaaaccgagctttctcgtggaagttcctgaagtcgtggctctcattgccatttgacaagtcccacggaatacatgtagatagccataaccgagttgaactcctagacttgatctctccacgtattccaatgtcttgtttgtctcacataatcgttcgcgctgaggtcctcgcagatggttctaacacgacgtgatccctctcgaacgcgtaaacaaaggtctctgctgcgctacacttgccttggtgctgaccagatgtggtgactcttctatttgtaacaataattgggctaatcgagcaaaggatttgactcaaatgcagttcagctcagtcgggttcttcaacatgccaccacaaactgccagtcaatgatttagaaagcacactggcgctggtttatgagagttgatgaattcattgggtatataacagtcttggacagagaaattgaacacatcatcagatggctcaaatccagaactttgtctctattgaagttgacctatccataaatctcactgttggacgaagaacaatcgcgaaacacgagagatcggaaacgaggtctccgtgcaacgccagatacaaccaacgcaaaagatgttgggagttgaattcgataaggcaatcttgtagcttttaagtcgtggatatgttgcggagtccacgaaaataagtcgggtcggttttgtaaagggattggaacgctgagaggtggggcggttgacaatgacacgcttgataaaaatgacatgcagcaagtgcttgcaaggcgattgggactataatctatcatagagtcgcagccgcctcgaccacacccgctgctttgaatgcgcccgggttctgcatcaccacctcaacggggaacttccactccatgaatcgcgtccaacctaaaataccagcccattagcatgttatcctctcgcacagcaagatcgggaagcttgttggtgtcacatactccaatatgcgcatcgtcgtcccaggtatttcccaaggaagggtaccaggaccatactcagaagcagctccagttgttcaatgctttcctgccattctgcctcggcatcggatgaatattccgacaaggtatcgaggtcggagtcgtttgtagattctgaagggagagaggcgagctcatcgtcggactgggactgggagtatgaggattgtcgggagggaaccatgtacgcggacatcgagaaggagggattcgagctgtcttgagagaaagacatgatggagattgttgtaaagagaggtggggttgagtgaatgaggggaagcgatgttgatcaagcagcggcctgcctactgcggttctacgtaaacgtgagagcagcctggactgtttcccttgatcgaccggcaccgccaagctccgtaattaaacacgtgaccgtgtaatctggtgactcacttggcggtcacgtgccaataccgcgataacagaattgccttcagacctggcgatatcagattccagcgacaattttgccatctgacactcttgctctagctcctcgaattcgcaacaacctgatctcatctctaacagattgtggtggagtgaatagcatctttgaagcctacaaacatggcggacgctgtacgtcacacccttgtctttttaccgaccctcccacattttctttaagtctgcacaatatcgacccctcggccgccaaccactctgatccaagaacgcacatcgtttagccgggttcaaggactggtacttttattgaaaagccaggctatacgatttcttctgctatttctctttttactcagaactaacaccgctttttgccgctccgctcaggaactcgaaactaaacagcgcaagtcggtcgcattcagcgaaggatcggtcatcatggataccaatggccaagtcacagatgctcctccggctgaggctcctacagccggtatgcaatagctctccgatcccagcagtcccccagtcgcctttgccacagccccactaacgatgtcttgaatatacagagaaggatgtcgacgaggtcaccgagatgttcaagggtctctcaaaaaagaagaagtcctccaagaagtctaagaccaccgaagccggcgatgacgacgaagcccccgccgccgccgacggcgagttcgatccctctgcgctgaagaagaaaaagaagggcagcagcaagtctaagaaggccgaccccaacgacttcgatgccaagctcgctgaggctggtattgctgaggaggctggcgaggatcagcctgaggagctccccgagggcgaccttgaggccggcaccggtatctgggctcacgacgccacacaacccatcccctactcgctcctcgtctcccgcttcttctccctcatcgagagccaccaccccgaccttctgtccagcggcgccaagtcctacaagattcccccgccccagtgccttcgtgaaggtaaccgtcgtaccattttcgccaacattgccgatatctgcaagcgcatgaagcgaaggttcgctatctcccacctatgtactcgttgaaatttcgtttaacaattttttttaaatagcgaggagcactgcacccaattcctgttcgccgaactcggtacgtcaggcagtgtcgacggtagccgccgcctggtcatcaagggaagattccaacagaagggtatcgaatcggttctgcgtcgctatattgttgagtacgtcacatgcaagacgtgccgcagccccgacaccgagctcaacaagggagagaaccgtctgtatttcgttacttgcaactcttgcgggtcccgtcgttccgtcgccgccatcaagaccggtttccggtcccagatcggccgcagaaagcgtgtgggctaagcggtggagctgtgctggcaatgtgcgaaggaagggcttgttttatctcttccttatggcgtgtcacttactagagcttttgcggggtggaaacaaggcatgatgcgtttctttctgccctgagaggcttgagatgaggaaacgatttgaagaatgaaaagtagtttcgcatggaatagactgatatcactatgtcttgccttcgaggctgtatgattttgtatctagttgaacgttaggaatgtggtagaatcgcccactcttaaatttctttcttttgccttttaagccttcggtcccacgagtctgatctgctccacggggtactaattagcaagcacttgcctattttaagtctcaagctcaacatcttaaagagatatcggatactttgtttatggcccttcctatggagtaccaaggataggctcgtaggtgtgtagtatatcaaattcatttataattgtggtgatatcgctgcaaaaattcgtaaatagttccacataaatgtactgagcaaaattggtataaaatggagagcagcccgtgattgagcatatgcccggtgcaatgaagaagtatacaacaaaaccacatgatgacaacaagccagggggcatcttcgtttgttccgaaagtagatgtcaacgtataaaattcacaaaccggtctcttctgaccgaatcggcatggtagaattaaccacccttcgcagcactcaacttcatctgggcagaaaaggcattcaggtttctggtctgtaggtagacagttccaggccccgtaaacctgcaagcaagaccctcgccagaggtaacgccggagacgataccgccagaggccacacgttccatcttgtacttgcagtcccaagccacaaggtggccattgtcgacgaagtagctcatgccttcatcaagctttgcaggtgtcagataaaacccccgttgtcaaattaccgggcatgatcaacttacatctttccggatgattgcaccaaaactttgcatccaaaggatcccacttcctgtgatcttgtagatgaagaatccctcaccggagaacatacccttggatagaccttgggactggtgcttatgcccgataccagcggtatatccaagcaaggcgtcgcgtccgattttccattcctttggttcgtctacgtggagggctataatatctcccagcatggaaggtgccagcaggagctcaccaggaccggtgtagtgggacatagtcatgctgcccccaatgaggagtttcttccatgagaacgagatagttcccctcaatgtgatcgttgtagacattccaatcatggcacctaagaggcaagcaagattagctctatggcaatacatactcgggacgaagatatcgattacagcatattcgcgtacaggaattgttgaactggataacttaccaggtctgatattcaaaggacagcccattgccagctgtacggtcaagacagagttgctatctcggtggctgatcctgtaacttccaccattgaagactccagtatcatcttggttcattccacctgtcccagtgagttctccatgttctgaagcatgttctggggttcctccagacactgtttgcattgcaatggcatgattttgttcgaaagccgcttgattgtaggcgattggatcttgctgaggtggactcactggctgccttccaatagtgttattgtaattgaaggctgcttggttgtaggcgattggatcttgctgaggcggactcactggctgccttccaatagtgttattgtaattgaaagcggcttggttgtaggcgattgggtcctggggcgggctcgccgacgtcggaggggctgcatattccctacttggggtttgtcgatggggttgggggctctctgctggtggagtggctggggtatatactccatttgaaggctgctttggcggtggtggatagtagggagccgcaagcgattgtgaaaatgctaaaatatttagtaagatagcaaagacagaagaatcggattaattacaggttatatgcgccggagctagacaattagttagtaacggatttctgtagtttgtaactttgtgaaggcactcacctgtcatgggtggtggggcataatagcttgaatcttgagacattgtggtggttttgatgtcgctgaacaccaatgtctttttattctcttagaaaagtacttctagagtcaaaatccgagtgttcacaggcaaatgaagacactagggaagtcagactcgctaatatcgtcacagcaaaaactcgtagttcctcccgtattattttgcgtcaatgggaagaataatgggtatctcaatggcctggcttgatttagggaataataacaagggaaataaaaccagaccggactctacggggttttctcttttaaaggggagctagcttttcccctcaccaacagctcatactattactattcttagagaggaattccactaagagattaggcgtgtgatgaggcttgcagctcgcagtcaatcagtctcgagtcacacgcaattgtgactatgtgccaccgatcttccccaccgggcgctaaaaagaagttgcatgtgcgagagttgataggcgtgtcctatgcatgctatttaccggggatagctcattcgtcggaattatatatgcaataggccgtacatttataagtctaggtaccaagagcgacagaaaccttgcccagggctgggcaaatatgaggggttgatcggcactttgtattagcgaactcgaagccgaatagttacggagtacagaataatgcgaagaggtaacaactattaggcattatggacaagattgatacaaagcaatgttgaatttttctgctacatacaaattcctagaactaaaggtatataaggtatatatatctcacggctccttggtccccccttcagatacctggcgtaaaaaggacagtgccttagtataaccggtttgcagggcgtaatccaaagccgttttcccttgatcatcccgcaagtcaagcctggctccgttatccacgagcaactggagcatcggaatcggattcattgcaggggtagcgagtcgaagtgcattgttgcctccggcatctcgagcattgacgttcgctccttctttgatcagcaactcagccatctgaagctggttcttcatggcgactgataggagcggtgttctttggccagacccctcaatatctgcgccatgggataatagcagccggacagtatcgagactattcttttcgcatgcccaatgtaggggagtgtggccgacctcgtctagaatatcaatgtttgctccgtgctgtagaagtaatgcgacaatatcgtcctggccttcatgagcagcaattgcaagtggactgatccccgagtgttgcgctgtaatgtttgggttggctccattttgcagtagcagtcgagttccctcgagatcatgggtggaaacgagatcacttaacgcggaacaattgtttggatctatcatatcaatatctgcgccctgtcggcgaagtatgtcaagtgctcgttgagacctaatccgggctgcaaaactgtaccccatcctaacaagcataggaaggtcttcataaagctccacccatcgcagcagaaggaaatacaataaagcatggaagttgttcctgaccagccattcaaggcatgcttgttcatcctccccgtctccttcgcggtcaatgtcatcgagcttatacaacgtgagccaatctttcagtgcgtgaatcgccccttcgattttgtctgggtcttggttttgatcgtttgacccctgtagatcttccgttacattcagtgatctcaaaatgggtttgcagtattccattcctggaacattcgcagaaaggttccacgcaatccacccaagctgacgtgagaacgagttccaccattcgatacgatcatcggatacggactgttgtaagggtggcacatggttgtggacttgaaggaattcagctctgatgtcagacgtgagaagctcacatgtctgttcgaatcctattttgcgaacatctttgttgctgtccgaaagtgcccggcggcaaagaaaccccagttcatggactgatctctcaaactgggaatcgtctgatcgctggcaaatccaacggacaagcgtaaaggcacctttccaatcacctttctcgatcaaccgctccctgcgcgccctgaccttggttgagtctgcagcgagatctggtaagagatgccgatacctgaggacgggaacaatgcatagcagtgcatcctctcttgagcccaatttgctgttctcaaagcaacgtatgagatcatcaatgcgggtactagatgctaaaaatgaattttgcaattcgggaataacatcaacgtccccgcccagatcatccaagttgaggaagacctccttgaggaattgaatgtagatatcctgggctaccatagcctcgagctcattatctgtcctgacagccaggactttcccatcatagggaaggctcttgggctcgaaactgaacaggcgtgatgaattatcatatccttcagatggtactagtctcgcttccgtttgcctgaagatccatttgtaaaagtagaggaatgtttcatctttttttgcctcatcttcactcaatccaatgaggcggcaaagagttgagttctgccagttttcatctgacttataaagtgaccaagtccacaagcctagaaccgcttctagctcggcgacatccagtttccactgcagagcatcaccgcttcggatgagaccaattgaatacgttcccggagcttcagtgacagagcctggagagggtcccttgcacttaaagccaagtcggaactcaaaggtctttccgaggttaactccccaactcgacattagatccatcgtcgactcgatcgtctctgcgaggttggaggcaattcggcgaataggcattccattccagtcaacacccaggctttgtcttgagctagtcgtgagcctcgcgagctgggttctggtgtggattaattgtttggccagaggtgttccaagatggggcgtgaatctctgtgaaggcatatttggtggccgatctgggatcgaggcgagttcaaatgactctactttctcaagataaaatacaaaacaatctatctcttgctgcttgtgagacgtgagttcccggtcgtctttcatcttattttcatctggattcattctttccgtgcgcagacaggtacgtataatagccattaggaatgttgatcccagttgagctagggtaacagatgaatggagacctctcagtccgacgaactgacatatgaatcccaaaattgtcgatatgagggtagagtaagtctccaaatacttcctgtcaaatcttcgatctctgatcgatttggtatagcggagtttgtccgtcattgaagactctggcccttcattgacggccaagaaagcattaaagacctggtcacccacgtcttgattaccgggctgcagccagtatatcttgcttggcttttctgctttgagatagaactcctttgaggaacgttccatgatgaatgcgcagaagaacattccgagaaacagaagggttgtcccgattatatagagcgggaatgcgtatggagcgacagctttatcgtttttctggaaatgctgaggatacacaaacaccgtgagtgtagcaaaaacaacagtgcctttttggatcgtcagcatcatttcaggctcaagggaggagaagcactgaccagtctgcagtataccaccaagtattgcagcacaatgaaaccaaaattgatctctccttttgattcccttgttcaatgacagattaggcatgtccagttcaggcaagtcagtaggtgaaactttgctattgcaagaccaagccttttcttcaagagcatctctcaaagtgccaatcttcgtctccttttctccggtggtcttgtctacatcctcccaagcaactatctccacgatcttgggccggccaaagactcgtgtaatgccgccatcgttgaaaacctccgcagtggactccgagacacaaggaagcagctcgctttcagcttcagcaggaccttcttgtgctcgtccgacaaatgccctgagggaagaacttccacagaccctgatcaccgacacgacggcagtcaaaacccctagtggtgaaagggcgaatattacattatcaagagtgcttatggactcggagaggaattgtttcgtaagtcgttcgccgaacaaggtgatcaaaggagccttgaagataaacatcagcacatccacttgaggcctcaatataaacataaacataccaagtccgtagcaagattattcgtgaaatcatcccaatcatcatcagccttgacaaaaggtaacaaggatagtaaaaacagtatagaaagaatcatagaaaacatcataaatcatcaacatcaacacatcaattcgtaataaaatagattataaaacagcactcagagaataccctccagcatggccgaaggcgcgctctcttaaagaaaacacccctccatcatcctgcgctatcgatgggcatcttttgccgatcctcactcgatttagagcgaagtacagagcccccatgcttgccccatgacaataatagaacgccaactaatgatatcaagaacactatgaacatggctttaatcttgtcggggtatgaaacacacaaggctagtgcgggcgcgtaagcgctgctgcgctggtgagtgtccccgttgtcactgcactagttgcggcccgcattgcgctatatcacggactgcgggtctggacggggcttttcttggaccggcgcgtaacttaccttgcacataggtggcttagagggttgatatggatatatataggatgtctgttatgcgggggacgttagtagcgtggaacagttcgttgtcgggatatcaatgttttcttggcgccttcagtccttattgtggcactctgggatgcgacatgtatcaaatttgggcaaagacgaggagacagacaaatctagggttgggaatatacgctcttcccctgcaatagggccggggtgtggaacatgtgtaaatcaacggaaattgtggctatggcaaccatatggtctaccttggcagggtgacgatggtggcatcattgcaggcaaatagagactttgactcttatcaaatggtggagatttcaagatattggccctgctcaagtcggattttcgtgttgtataatgaactccgtgtgatgtgaggtgaagatcgatttctctgcttatgtatattttttgattcatcaaatccaaaaaaaaaaagtgctgacaggatataaaggcaattcaatctattatgttgaatcagatggaatcagtgaatgttcacagccctgtggagttgatgtaaatgttaagtcaatgtccggggcggagcttctgagatcttggccagatgatttaggctactcgataacacccgacctcaacacccactctcccgactccccctactatcgtttctgtctacttctcttggttctaccatcgttcccttcaatacataccatccgtgtcctttcacaatggcgcccactgtcaagttcgcgtctgctatgaccacccggtcgctccgcatggtccggacggtatggctttccggcttcctgttcctgaaatgcgaccgaaacactaattccacatcatccaggaactagaattccttgccgatgcctctgtgatcactcccaaccagctctcaaccattctatcacagttgcccgccgattccgaggtctctcgggcgttgcaggcatcaccatcggagcaggcacagcctgcgcctgttcaacaagttccagtacaagcgcagccacctccagctccatacagcaacacgccctcatactcggctcccgtctcacaaatgtccaatatgtcggtgaacgagaaagccgcgctgaacaatcaatatgccagcccgccccctcaggcgccgccttcttatctccaagccccgccgctccgtctggcggtggccatgtacgaattcaaatctaccgacccgggtgacctggacctgaagccgcatgatcgtgtccagattactgaggaaataaacgcgcactgtatgttctccttctattggatatggaaacaaagctgactagtgattaatagggtggcgtggtcgcaatgagcgaactggtcaggagggtatcttccctggaagttacgtggatgaaaaagctgcgcttgcttcgcccccgccccagtctacagactatggaaacatgcctcttgcggtcagccagagtggacagcccgaaaaccccgaggacccaaagaagaacaagttcgaggaaggaggcaagaagttcggaaagaaactgggcaatgccggtacgtcttatatacttttggtactcgttatttggtttctaacttgatattagcaatcttcggtgccggtgctactgttggctccaacatcgtgaacagcatcttctaatcatgcggccgggcaattttgctgggcattttgtttcttattcactctcattgatacggtgttggtggcttgggttttgcttctaatggattggctaggctcaatcacgtcgcttattggcggacttatgtccagaaatttcaggatccccagtgttcagatcctacttagctcttcattgcgatagatcacttagggctacacacatacttacctcaaccaatgactttcctgatattttggggccacctcataattgacctagagcttgaatttcagagcaacaaagatcttacctttctagcacgcaatggaagccaaacgaaagagcataggcaatattccgttacaggcttacccccatgactctgacatgcagcaaaaaaaaaaaaaaagaggatagaaagcataagttcgggttgggaatgacattctgctttttggttattcttctacttcttgtgtgggctatagaatccagactgaacttcgagatacatgatttcatgttgttatatagaaagtatgtaaatgacaagcaacgaaaaggaacatttgaatatctatcccttatacgtgtcatcaaccagccctagagtctgaagatctaacttgtctattgatgggctacacattaatgtacaacatacgatgagcaaggaggctaagcctaacctggtgcccgatcagccccatcgtggggacctgggttgaagactcattgtgactcttgtgcttacttcggtataatatagcgtctgagaatggcgattggttattgaatgcatattctgttgctcttctcctatgatatcagtgattagggctaggaatgcgcacacaaggccgtatgacatcaagttgtgggtcaagtagcatcattgtcttgccgatggcttaaagcggactatatcagtatgttttatatacaaattaccggggatacagtactgttgaagactatataaactttccttaacctcatattgtcgataggagtcttgaatatatgaaatagtgtgtataattgcaagtagctgtggcaatgtggtgggaactgccgatgagcatagcgaactccaaagacccattgtacatagcccgtatgtacaaaatagacaaaaccctacaaactgcgaacagccatacagagctgatagaagtagcaaatgatttcaaatctaaaagagagccgagccacaacgaacaagagtaagacgcctttgacccagatacccactaggcccaatccggaatagcgcattctcccctccctcgagaagcttctgtgtcatcgatataaattgcatttctctctttaccctcacacgaccaacgtcatctctctccacgcccagctctattcctaccaaacccaaccacccaaaccaccaaatccaacctcatttcaaaatgtctgactgggaaagcaccaccaagattggcagcaagttccgcggagcaggcgctcaaccccgcgaggtcgtcgtcaagggcaagagtgccctgaacgctgcccagcgctctggcggtgtcatcaccgagaagaagtacaccaccggtaacatcgtatgtgaagtttccttcgaatccgggagaaacaccatgaatgtaggctaacccactctcaagagtgccaaggcaggcgcccccgaaggccaacacttgaccaaggtcgaccgcagcgacgacatcgtcaagcccaagaccatcggccacgccgtcgctgatgctatcaagagacgtcgcacagaggagggctacaagatgacccagaaggaactcgccaccaagtgcaacaccactatcaccattgtccaggacttcgagcgtggaaccgccgctcccgaccagaaggttctcggagccatggagcgtgtgctgaacattaagctgcgtggctcagacatcggctctgaaaagttccccaagaagaaatagacgggatttagtccgtggcctttatcccttccgggatgggaccggggcaaatctcaagttttctgcatttgctttttttgcgctctatgactgtcatgttccttctccttttcatgagacgtcactttttttttattttttttctacgggtttcttttctgctggtcggattagcgctggccttgcatgggaaacgggtttagagaagatatcacgaaaaaaaattgtataaatgagatacctcggattttgatatttatcatctggttttcttagaaacttgtagttggcatccaagtgtaaatttgaatacggagtagatggatgttgttctcatacttagcgcatcatccatgccatgcgatatatatatgcagtggggtaaatatactccttccctatacgagggactatgccaatccctgctctgctccatccagctgaactgtcagaacgtaatttgaagatttgcaaagctttgatttcgtctattgacccgatttcatctcttttgcggaggaccaggacagacataagagctcaaaaaaagaaccatgtcatctttttattaaacaaagacacaaacacaaggtaccaactccgattgatcatggaatcaatgaaatgagaaaatcgtggaccggaaggtcatcccattccgtatgcgggactcggggaatttgtcccaagtcttttcgcctcgtaaacacatacacacgacgcatcccaactttcttcaccacatcccctatttacttccgcgcttgctcccgctcgacctcgtacatgaagtcgaagtatgccttgtcaaagtggtggacacggacgtatccgtcctcaccaccggaggcgtatgcggtgcctgcggggtgaacatcgatggtgttaaggggaccgaaatggccacgaacgcggccgcattcatcttcgaacacctgagtaataagattgttagtatataagttaagtcgtttgaatgcatatttgtactcactctgtggtagaatcgtgcctcgaatttaccctggcgggcggaggtggtagtaacatccatggcggcttgaccaccacccagaatgacaaagtccttcttcggtgtcacgctagcagtgttgagaggagtgtcggaaatataggttttgaggatggcgaggttgcgggaggacaggagctgcataatattagccgggggttgcctaatagaataatctgcaaaaggaagaacgtaccttagctgacttgtctttcgacgcagtaatgaaagacaagcgatcaggcgcgaactgaatgtcagttatttggctgtcgaattcgtgaatctgcacgttctcgacttgttctccagactaaagatggtattagtatcccacattcctccaaccacctcaaaaaaacataccttaggatcatactggctgacgctgccgtcctcgtgccccgcaatgatgtacttgcccaggaaactccaccccgccacggtagccttgctctcctcacaaacgatggtcaaggtaggctcggtggcctgcgcgctaaggttttcgccgtagttgatatcgagaacggcgatagtaccattgaaacccatgcgcttttccgtcacggccaaaagtctgcttccatcgggggagaatgccacgcgcttcacggctgtcgagaactcccacaccttaacacactcgccggtcttgacgttccatagacgcacggtgttgtctgctgatccggttgcaagaagaatggtgttggggctgacgtcgactgtccagacagcaccctggtggccgttgtaggtaccgagacgctcgccgttggcggaccaccatgcgcacacaatcttatccttcgagacggagaagaggagatcgccgtcgctgttgaacttgatctgggtcagggaccgctcctgttgttatagttggctgcggtcagtctctgtggatccagcaagatttcgaggaagtcaacgcacatggccggaaagcaaaatggggcgcatttcgaagggtgaggtgataggaaattcgagatggagtatcggaggggaaaaatctgagacgctcggctcagaaggggtaaggcggagtggcttttttgggggggtcaacctcgtcaacctcactttctttgactagtgaatttcatcgcacactcggccctcaatgccaagcctttatcggaggccaacatattccgcattccggtatctacacgtgactactatctgtctaccctgagccctaactaggattcccgaaaaggttaatgcggctgagatttatttatgcctcaggcagaacaaacaaatacaatatctccggagtcacgtgctttcgggaaaccgggaaactcccggactctccgcacgagcttaattaccgaaaaaaaaagagatgaagtgaatctgagggaaatatctcaaaattgacagggctggctttaacctcagtatatctcttgagcgttgcaggtgaaaccaaggcctaattgttgatttcttctcgcaacgccggtaccaactccgcgggttcgccccaaacaagcaataattcatgccattcgtccccgctgccctaccccgctgcactttttatctccaagtgcatgggggtattctccgaaaacttcctatcctatcccgttctttgctccatacctcttcctcgatccaaggagtcagacggcttcgttcattgtccattgagtctccagtgaacgccgatttttctcttatcagctccgctatctcaccactccgaaagttttccgggtcagcaatggctgccgcgaagattgatggcactgccatcgcgaagagtattcgccaagggttgaagtccgagatcgagcagattcaagtgacgaaccccagattcaagccaaatctggttatcttccagggtaagcgtgacccgctccgagcatgaatacatgtaatgtagtgttgaatactaacatgacgattcttatctagtcggcaatcggtcggattcaagttggtttacctacgaatagtattgaagatcttgcggactaattttacttaggcacctatgtgcgcatgaagctgaaggccgcccaggaggtatgactcgttgttcgggatatccgaggcattctctgaccttattcctaggccaacatcatctgcaccgtgatcaatgttcccgaatcgagcaccgagttggagctcatccaagagatcaccaaagccaacaatgaccccgctgtccacggtatcctcgttcaattgcccgtcccaagccacatgtccgagcatgcggtcacgtcgagtgttgcagatgagaaagatgttgatggtttcggcgcaatcaatatcggcgagctggcgaagcgaggcggtcgcccgttgttcactccgtgcacccctctcgcggttatggaactactcaaggcaagcggcgtagaccccgccggtaaggaggcagtggtactgggacggagtgacatcgtcggcagtccggtcagctatttgcttaagaacgccgatgctaccgttactgtctgccactcaaagacaccggatattgcgcgcattgtcaagaccgccgacattgttgtagcggccattggccaaaccgagcttgtgaagggtgaatggttgaagcccggtgctgtagttattgatgtcggtatcaattacaagcctgatgcgactaagaagtccggtgagcgactggttggcgacgtggactttgagtctgcttcccaggcggcctcacaaatcacccccgtccccggtggtgttggtcctatgacagtggctatgttgttgaagaacgtggtgggtgccacaaagtgctacttcgagaaacagaaggaccgccacgtcactcctcttcccattcgcatactaaatcccgtgccttccgacattgctatctcgcgggcccagtaccccaagcccatcacccaggttgccaccgaggtcggcattgcccctcatgagttggagccctacggccacaccaaggccaagattagtctgagtgtgctggaacgcctctcccatcgccgcaacggaagatacatcttggtttgcggtatcacacccacccctcttggtgagggcaagtccactaccacactaggtctcactcaagcacttggtgcccacctgaaccgcatttcctttgccaacgtccgacagcccagccaaggccccacattcggcatcaagggtggtgctgctggtggaggctacagtcaggttattcctatggacgagttcaatctccacctcacgggtgacatccacgccatcaccgccgcgaacaaccttctcgctgcggctattgagactcgcatgttccacgagtccacccagaaagatgcagctctctacaagcgtcttgtccctgccagcaagggcaagcgtgaattcaagcccatcatgttccgacgtctgaagaagctgggcattgagaagaccaacccagacgatctcactgaggaggaaatcacccgctttgcccgcctagatatcgacccagagaccatcacttggcgccgtgttctcgatgtcaatgaccgtcatctacgtggtatcactgtcggccaggcccctaccgagaagggcctgtctcgtgagactggcttcgatatctccgtcgctagtgagtgcatggccattcttgccttgagtaacgatttggcggatatgcgtgagcgactgggccgtatggttgttgctacttctagaagcggcgaccccgtgacttgcgacgacattggtgccggtggtgcccttgccgccttgatgaaggatgccattaagccaaatttgatgcagagtttggaaggcactcctgtgatggtgcacgctggtccctttgccaacatcagtattggcgccagctctgccatcgccgataagcttgccctgaagcttgccggtaccgagcctgatgaggaccatgaagccaagaccggtttcgtggtcaccgaggctggcttcgacttcacaatgggtggtgagcgcttctttaacatcaagtgccgctcctctggtctggttccggacaccgtcgttattgtggctactgtccgtgcgctgaaggttcacggcggcggccccgagatcaagcccggtgcccctctgcaggaggtctaccgcaccgagaatgtggatattctccgcaagggttgtgttaacctgcggaagcacattgctaacgccaagctgtacggcgtcccggtggtggtggctatcaataagttcgacaccgataccgaggctgaaattgctgtcatcaaggaggaggcgatcgccgctggtgccgaggatgccgtccctgccaaccattgggctgagggtggagccggcgctgttgatctggccaaggctgtcataaccgccagctccaaggagaaggacttccggctcctctacgacctggatggtactatccaggagcgcatcgagcgcatcggccaggccatgtatggcgctgagaaggttgagttcagtgaattggctcagaagaaggtcgacgcctacaccaagcaaggattcgcgaacctgccgatctgtatcgccaagactcagtactcactcagtcacgacccagccctcaagggtgcccccaccggcttcactgtgcccattcgggatgtcagattggccgtgggcgctggatacctgtaagtttttatccccgcattttgtgggaattcgtcacgctaacatagctatagctacgctctggccgccgatatccagaccattcccggactacccactgcccccggctaccttaatgtggatatcgaccccgagactggcgatattgacgggctgttctaggttacgatatagatagaggacatatttggagcttgcatataccactgttcgaatttcgattcttcaacacatacaattggcgtctgatagttagggcccttagatggatttttcaacaccgcgcaatccggggcaattggacacgcgaaattcatcccgacatattatttcataatcaataacatttttttctctctgaatatagatcgtacaattcggttggagctcttccggggtcaaaaagagggccggtcaatggccggagttgagctccgttctccgggaaccgctttaccaccgcgtatagacttcttcagcgggtcgattgatggagctttgaggtaaaaaaattggaaattttacctgagaaaggattagatcgatgactcaggacacttggaagagaaagatataaagaaaaagaaaagtccacgtgaaattgtcctaaaacattcccaaaccaaaatatccttgatatctcgtgaccgtccggcttcggcgcttcttcttgcggaactgttcataaagtcgccaacctccattacaccggacaaggctttttcctcttccactccttcgaaccctccagtttccttgctattcggtaattatcccttggcttactgccttcctggtcttattccgatcaattcccgtattgccccggtgccttaaccccccacgtacacccccatccccgaagtcgcatcttctgtcaaccgggaaatttcccgactccacatcttcctttctgccgaacctcattccctcggtagtaaaccagcgagtgaggcgactcgcattccacccagccaaacagaaactgtgaaactagcgctgacgtctttagccactatcccacgatgaacgctctccggtctagttccgcactcgctcgtcggtccctcgcgacccctcctgcccctctctctcccacttcccgtcttatttcttcctcttctttcacttccttactttctaagagatctatctcctctacctctctttcccaacaaactaatcgagttgttgcttgttcccgctggtccggatcgatcccctcgtctttcactcaaacccgcactatggcttccgaaaccaagattaaggtcaagacccctgtggtcgagttggatggtgatgaggtatgggacaacccccccttttatagttcaagctttcgatcagctggcttcacaaacccgcgtattctcgtgcttggctgccgcattttcgtcgaaaacgcggggaatcacggggaattttacgataattcatgtgtcaggccgacgattatgccgcccaaggcattgaagctagacattggcatgtgctaactggacgatcttccttaacatagatgacccgtattatctggcaagacatccgtaacaaggtaagcctatcgtcccatcctcgctcgggtcagacctagatgatcgcccaccccggttagttctcgatactaatgatctgcctatagttgatcctgcctttcctcgatatcgacctcaagtactacgatttgggtatcgagtaccgtgatcagaccaatgatcaggtcaccattgactccgccgaggctattaagaagtacggtgtcggtgtcaagtgcgccaccatcacccccgatgaggcccgtgttgaggagttcaagctgaagaagagtaagctcatcaatggaagtttgtatcgtgtaacactaaagctaaccatctctagtgtggctctcccccaacggcactatccgtaacattctgtgagtaagctcaatctaactggctttgaccatcactaataagctatctagtggcggtaccgtgttccgtgagcccattatcattccccgcgttccccgcctggtccctggctggaccaagcctattattattggccgtcacgccttcggtgaccagtaccgtgcccaggaccgtgtcatccccggtcctggtaagctccagttggtctacacccctaccggtggagagcccgagtacctccaggtctacgatttcgagggtggtggtgtcgctcagtgccagtacaacaccgatgattccatcgctggcttcgcccactcctctttcaagatggctctcagcaagggtcttcccctctacatgagcaccaagaacactatcctcaagaagtacgatggtcgcttcaaggacatcttccaggagatctacgaaaaggagtacaagaaggacttcgaggccaagaagatctggtacgagcaccgtctcattgacgacatggtcgcccagatgatcaagtccgagggtggcttcgtcatggctcttaagagtaagtttttccgtctatcttgtgttagtttatcttatctaacgtatgttcagactacgacggtgatgtccagtccgatatcgtcgcccaaggattcggctctctcggtctgatgacctccactctgagcacccccgatggtaaggccttcgagtccgaggccgcccacggaaccgtgacccgtcactaccgtgagcaccagaagggtaacgagacctccaccaaccccattgcctccatcttcgcctggacccgtggtcttgtccagcgtggtgagctcgacaacacccctgatgttgttgccttcgccgaggagctcgagcgcgcctgtattgatgtcgtcaacgacgaggctatcatgactaaggatttggctctcgcctgtggccgcaaggaccgcgaggcttgggtcaccaccagcgagtacatggctgccgttgagcggaggctgaaggccaacctcaaggctcgcctgtagattcccatttgctgcaaaatttgatgagatactccagtcttagattccctagaaggacaggcattcgtctagcttttagccacttttgtatagtatgcaattgaattgtcattctatatattatttttcaaagtatatcgtggacaaacaggttctcaacggtagtatctaggttcctgcgcttgtttcaggtgatacagttttccattagcccggctcaaccactccctgtctacctcgctaccacaggggtaaaaagttctcctgtaccgattatgggacgtaacatataatcctcaaaacgtcactcacgccacaatctgcttggggacaaaatggaagattaacaggaatcggagtatccaaatcaggaaataatggcttcattctcctagccgaacatcaacttcaaaccctaagcaggacagcaaccatacagaacatgtcccaagtatgaagcaaacaaggatcttccacctgataatgtgatatctatcccaaagccgtggtaactttctctaaagttacgggaggtcgttaccgaacaatcaccaaaaacctagaaccaattagggtatgattcggagatgtgggatccataactctattcggacagccaatcatatcctctgattttagttagccatcgacctagatcgaggtcttgacgcaagtggttatcgtcgcttcccaatgcggccaattcctcttttcgacggtcaaaccaactctcatacagggaacttgattggaagactaggggctcgggtgaaaactcctgccaatctggctgtcaaactcgtttgttcgtcacagggtagccggcgccagatagatctgggttaagacaggcgttttctttcttcctttcttctaaccttctacttgggattggaattgcacttctttacttgaaataagactacctaccaataatcacccgctgtgtgatggcggtgctgttctactacattccgttgaatacgatgccacacgtctacggcggtctccattaggattttgctggtatcttcgagacttgtcaattggtccttgccggtcgaatgtacgttgtggccatctcgtcggtctttacggggctggcggttctggttgttgccctgcggttatacactcggatccacctggtgaaggctcctggactggacgatttgattatatttgttgcattggtatgtattctcatatgatatgtacaccacgagtgcacgcgtccgggagacggagtgtatggaaagtgagaacccaatactaatcatccaatacagctcgtcgacgtggcattctatacctttacgatgcttggtaagtggtctactccaacaacacctcgactgaaatatacctgaatctaacaaattcctccatagaacgattatacggcatcgggatccgcgcatcagaactctctgaatatgacatcgagcgccaactatttgtacggcaaaagtcccttccgccatcgaatggaacaagccactaatgaaaaccaatcacagtggttgtggctttcggtccctttttacaacatgactatgatcctagccaaattctccgcactcacactctacgcccgcctcttcaggccccgtcgcttcctgctaatcacctacagcttaatgggcttcctcgttatcgtaggtctgtggacgagcctgagcggctttctcttctgcattcctctccacgccttctggagtccatcggcagaggttcgcgactcaaactgtctacctgccagccctgtctggttcaccaatgcggcactccagacttttaccgatctggtaatattggttctgcccctgtcgctattatggaagttacagctaccgagaagacagaagtgggggatcctggtggttttcggtcttggaatcttgtaagtcgaagtaacatagtttgtggttgatctcgggaaatgaagctgactctgcttacagtattgttggcgctagtgccgctcgcatgtatccattaagcatcatggttggcggaggagattttacgcgtaagtatataccatctctccacgtcttgcgatgcacggaatcaacaacaagactaacacaccgatagaggcaaatgccaaagcagccctttggtcctgcctcgaagcaaacgtatccatcatctgcatctgcctaccaccactccacccgctcttctctcgcatcttctcattcttcttcctccctcgaccgatccgctcaagagcctcgaggtgtcattccagcagatccccgctcaaccgggatgccgggatctggtgcaacgaactcttcagtcccggaacagcaagttactctgctagcatctccaaggtcgatacgaacgaagaggagcaagaaaaagcagaggggattcgtgttaaacgcgagctgaggatgcagtcgaatactgttccttctttttcccgtcctcagtctgcgaatggtacctatccggatatcgagatgacagaggggtcgggcagtctgaaatcgtctgagcatccatgctcgaatgctagttttgagagggatttcggtgatttcgagttccccgactataagaatcgaatgaatgctcctatttgaaattgtcgggagcttggtttgtatatatggaacataccaatgtctgggatgtgattgcatatactgatgatatgaataacgatgttgattttatgagttttattgagtcatgttcgatgcgggtggaatatttagaaatttagaaagcttgatatatagtaccctgttataccccgttcgagactggggaaacttctgtagaaacctcaagagtaccaaatataactagtccgaataagaaataagcaccaacccttccgtctcaagcctagaacgactcaaagattcgcccgcgaagtcatcttcctctgcatagcctgttcaatcgccttggccgcagcaatacacttctcttcaccgaaccggccaccaacaacctgtatcccgacaggcataccctccaccaggttgatatcatctaaaaaggaattagcaccgtcctcaaaggctccaatcttatatactcacattgctgcttattaaacctatcactatcatttctcggaacatgggccagccactcatcatccggaacatccttcattctcgaagcagtagtgataggcattgccaacgcagcatagccaaggaaattccagatactcgtgtagcccacatatgcactggacttgacccacgtccacggtttgtatcccacccatgaggtattgggcatgatcaatacgtcgatatcggaggttatccatctatcgagatatgcagattcgaaattatatttgtccgcattgagctatgagatatgttagcagttaataatcacagtgccgataggagtttctcacttggtgcgtttgactggtagtcagagtatcctcgggcttaccaacaagcataccctcaacaagaggctcgccggttttctctatttgtctccgacagccctcgccgccgtcggagaaaatagccttcgcccagaggtcatatgcataactgtgtgaggaggcatcccactcgaacactgggatttgtcagtacgtcgtacagaccacgcattgggagtggaggttgtcagttacgatacataccctcatggcccgccgcttccagcgcctcaacaacctcccgcatagccctcgcaatcggtggctgaaccttgacaacaccatcatcaaccaagaacccaatccttaacctcttcgcaccaggcgaagccaactccttccgccacgccacaggagcaacatgctgatcaacctcccacggcctcgactccggcaaaacctccatataccgctcaatagtcaccagactacaagccataggcccagcaactgatctcacaatatcctgcccgggactagaaatcatcaaaatcagcaccccctctaacaaacgcaaaacagagaaaaataaacttacttcccccgttcatacggatgtctaccgggactaggcgacaatccataaagtccacacagagcagccgggatacgaatcgaaccacccaagtccgtgccaataccgagcacacttccacgcgcagcaaccagcgagccctcgccgccggaactcccaccggaaatcagactgcggttgaaggggttgacgcattggccgaagacgtggttgtacgagtcggacatcatcattgactgcggcagattggttttcacgtagaggacggcgccgaggcggcggagtgtacgcgctacggatttatctgctttggcggggttgttggtgaggccgacccagcctggattttgggtttttgttagtatataaggataggtggctttttgctatatggaagtggaaagggagattaggttaccgattgaagtgtcaactccttcaacggagaataggtctttgatggatactggtaatccgtgtagagggccgatagtcttgcccgtctgggcgagataatcatctagtttctgggcaacggcgaaggcctcttcgaagaagatctcagtgcagcatgttgtcagttggtgggcgagagcggcgcgcttggcgaagactcgagtcagctctagggacgagagttccccagatgagagcttgcggagaaggacggcgatatccgtctcttccgtgagagccagttcctctggactgagaatttggcgcagatatgccagagcgtctggggcggattctatagagggaacgggatctaagcgccattcggggatgatgagcgagagctggtcggcgcgcttttgagcgcaacggtcttggtacgaggtagaggtagccatgggaaataactatattgtatgtttatgattgaactatggaggtaggaaactggattctaagaggacctttatatgctcaccaacaaagtagataaggaatgtgataccttacccgattaggaaggcaatctaaccgagactaaaccccacaccgcatatcctccacctcctctcgcactgcgcctctgcgtccggataacgagggaattcacatgactggcagttacgccagtagcctcgtattatctcgcactgccgtgttatcgaggcactcatccctatcaggtatgcgggggtagctaggtgcacgtagaacctcgatgtagaagggatctccgcgatagcctggcaagctcgatccaccatggaagacactacatttgactgatatgtcgatgcagatgaatcgccgcccgtggccattcctgcgcgaccgaatgccatgattgcggcggcgcctctatacacggtcgcagcaagatggcggtccgtcaagtcccccgagttgagctgtagagtttgggctattgctcgagcacagaggtccatagcgcaggttccattgccattgcggtgttttgcaagataaacaaataaatcgaacgtatctgctggacatccgactgagtcgaaaaatccaatagttaaggtctcgcgatgccaatcctcgaaaattaatggactttccctgacaagggcgcctgtaacatcaaaccacaccagataggctaggatatctgctagagcggagatctcgccgcagaggttatcgagatcagccttatgttggcagtggagatctagcagcgagcgcgccccttggagatggcaatgccagttgccaaaagatccacagcacacttcaaacatggcgaaagtggcgatgccgaaaagcgcaattgggtgtgcggactggacaacttggttcaggtttgtcaaggccactagatgcgactggagggattctttgttgtttgcatcttggatacgcgagcgggcgaagtttagcgtgcgtgaaatcagttggattccttcttctggaatgtcacgactgctggattgtatttgttggcagaaagtgtccaggaggtcgacgaagccgtatagattgatagatgctgacttgtaaacttcgacatttggcgattggtcattgggagtctgtggtgaggtgcttttgggcgatttcggcttcttcttatcatctacccatacaactcgctgtggatagttgcatgcttctccaccctggacacaggcttgacatcggggccggttcaagtcacatttgagccctcgggctttgcatcgaccacagtctcgatcgtgccgaatgcctcggggctttttcactttcatggtgtgtgtgaagttgccaggcttggaaggctatcaagatgcatagtgcgggggttgcggacacttccccgattagtcttgggtggagctctcgtatcttcgatgttgatccttttagtgttttggtttcggctgtttctatatcttcttcagtgccggaggaaaaacaagaagagagtgtgcattttatctagcaataaccctgcaataattgggttcaactctggttgaggtcaacaagtgaaggacacacgctgcgaagaaaagtgaaagacaatatcatcaaccgggagccggttggaaatgatcagagacaagataaaacgagggcaaagtcacagccggtcgagaatagtaaaattaaaacaaagcctgcagcaagaatagagaaaagagcgtgaaagaaaacgagagacaaatttgctagccatgtgctaactgagagcaaaaaaaagcaatctcgccagcaagaacagaatagcccaaatgaatagccagacccagaaaaaagcaacagaaaagaaggacatctatctataaaccagaaaccagtcaaataacttttgtgaataataacatcagtcaagacagtgatacagcctcatgtgttgttcagaccatctctttctgcataactcagtgcttgcacatacccgggctccaattgggaatccgcatcatgtttcgatatggctgcttgccacgatcggattgcttcctgcgttgcatcatgcgctcacgtcgatcgcgtctcttggtagccgaattcggttgctctggcttcaggttcagcgcttccattgaaatcgataacggtgattcttggaactttctttcttccgcgcgtcgacgacgcagtataacctttcgatgatgtcttgagataacacggatggaggagatcttggagaccttggagttcgccttggaaacctttgacacctttgagtctgagacttgagagagactctttgcttctgcaacactgatactggcatacaaactgcttccacgggagagctttcttcttcgcatcctcttcatttgctcgatggcagcaactgtgagagatcgagtggacgcaacgcttccactttgcattgatgcaacgctttcgttttgtagggatgcaacgcgctggggcttggcaaacggtccatcatgtgcatgtggataaggggactcaggcctgcgagtgttcaccgagttggtcgtggacagaggagggctgccaacgccgactgttccaaatatgtgaggaggaagcgagttctcgatgctcatacgtcgttgcattccagcagggcctgatgcaatatccggataatgtgagttcatgtcaagcacacacattccaacaaaaggcgcctgaaggatcgcactgaaaggaggctgctccaagaagtggcttggaggggcatgatggagcaccgtaggcaaggaaacagcctcagtgtgctgggtacttggtgaggcgggttgttcctgacagtctttggtcgggcagggcttattggcagccacaggagaatcatttcgtgagacgctctggtgcagtgagtccacaccgtacgagcagtgatgacagacaacgtcatattccccttctcgtggtataaatgtcatggacgccgggtacattcccatatacatgtcaggggcccagttgcaaacctccaaccaagaaggtaactcgtcgagtgcgataagaggcgtccaaaagcctcccggacgcaggatgcaaaatcgtggacgtgggcgtagaagaaagcttggagggtgctgctgagattggacaaagtccggacgtggggtagtatattgcattttaaagagactggaagaagaaggaaatgagtgtagtggaacaatgattgtataataaaagagtgttgtatgaaagaatgtatggattatggaagaggaagaagaagaggagaaggaagaagaagaggaagaggaagaggaagaggggagcgatggagttctgtcgattctgaggaaggaacagcatagacagtattgcaggaaggagcgatgggtcaaatgtcaaaaggaaagaacgatagtgatgaccattcccagtaagtataaatctgatttctagcagatgttcctcttactgaggagcgattggctagagtattatattccatcttgtcacgtctgctggacaatatataccggacacgagagaggtcatcaaggtcaatgacgccatatgtatatacgatgatatagcgtcaaattttcatttccttccaagttctgccttggcatcaccatattgtcaccttttcgattctccttgtagtcaagttgagtcaaaaccccccgggctgattgatactagggctattttctccttatcttctcttatcgcgtgttatcggcacttcaaagcttatcggcccggatgcaaacaacgtccgagctactctggcagccaagtgttgtacacaactcatactcactcttaccaacttaccttcctctctcctcaactcccttccttccttctcaattacaatcttttatcaacaaaaccgactccatcatgacaaccctcacagacccaacgaacgccacccgcgcaactccaagcattcccatcgagaaagcagtcctccacatcggcagctcaaccttcataagcgcccccaaccaagaagtctgggcagcgctaacaaacacctcaacctggccaagctggaatagctttgtgccacgggtaaccattcgctcccagccaaccccagatccatctccatccacctccgcaccggacccagcaccagcgtcaacatcaacacaaaccccagcaccaacctcccaaaccgtaaatacaaacacagaactatctcctattctccaaaaaggaacaaaattcaccctacacgtccgcatggacccaacctcaacctccaccaagccccagccggcaacagacgtgcatgccctcatcagcgaatgcagagcgccaaacgcggagaccggcgaggtcggccgtatcgtttgggtcgctgattccgaagcgccgggctcgttttcgccatcgcttttgacggcggagcgtgtgcatgagattacggctgttgagggtgggacagaagtgaggaactgggaggcgcaggttgggtggttggtttatgcggtgcggtggctgtataaggttaagctgcaggcgaattttgagatgtgggttgctgatttgagggggtttgttgaggggggcagtattgctagttcttgattacgcgttgaaactgttgccctgcgagctaggctcgaaaaatctgggtatccccgtaacatgatcaatagttagccacctggacactttattacgcatgattcaacgaaaagtggcatgatacgagtgcttgaacatcccattgatcctgctccttgacaccggaatcggatgagaatggcctgagcgttgagccaaatggcatttgcgctggattcagatggtcagtagaccgcaaacgcggccgacgtgtcatgctatttaattaaatattatgttcattcctccaatatgcaagtatgcaaatatgcaaatatgcgaacaaaatgtactccaatgccatacatgttccgccaaactccatctaaacagggtatatggacaatgcaaataaaaaccaaaacaaataaccaaaagagcatagcaaatatatcccgtctaacatcaagcagacgcaagctcgacccaatcaggcgtcgtaatgcgcatcgccggatccttaacaacagccggcttaacaatgcgctcaacaaacccattcctcggaacccgactgccgttcatacccgacctcgcaaaatccacaatctgatgcccagccctcgccatctcgagcctgagccgatggttcatattaggataaagcagcaaatcgcccgtcgcagtcgcaagcagcgtagccgccagcgagaagacatccgacgcaggcgtcggcgccatctcagtagacgtgagggaagccagcatttccggcgccgtgaacggcggcgtgaacgagggcatggatgcgcgcgtggtatcgagcggcgcatcggccgtcggaatatcaacggtggcggagaaatctgcgaacagaggctcgtaagggaactcggggttctcgctgcactcgtctgtgtcgatgggtcggaggaggatgttgtgtggtttgatgtcgccgtgcacgacgccggcgacttggtgcagccagttcaggccggcgataagcttgcgcgcgagctcctggtacgaggctgggccttggacggggtcgaacattgttgctgttgcgggtctgcgggtgcgcgcgagctgggattgctcttcgatgtatagtgccagggaggaggggacggcggtcattactagtgcgctaagctcggcgctgtagccgtggaaggggacgatgtagtgctcgtggccttgggtgaaggtgaggcgggttagggttgatgcttcggctttgagaactgggcgcgcatcgcggcgcagtggtgctttcacggctagcacttgcgatcttgaggttggggagcttgggggtgtgccggggagattggtttgcgggcgtggcaatgagcgcgctttgtatactatgctccagacgccgcggccgaactcggcggggcggttgttctcgtcctggcagatttcgaggtcgtcggtgaattgtagagtgccggcattgtccttggaaatggacgtttgctttgccaaattttggaatggacttggagttgatcttggaggcctttctttggctataggcgtcaccggtggggtgagactcgatggggcttgagccgacagtggcgggctttggccggctgtctgaagcgacaattgaattggggaattggccatattttcagtgcgcaataccggaggaattcgcgagcagatcagggtctatatgatcccgggggaacgggcgagacccgcgtaatcgttctgatatcaacagcgccaccgggacatgcgataggcaaattaagcctcacccacgggtgcaagtataataatgacggagtggcgaatggtgtttataagattgggctagaagatagacaaagaataacagggaaatggctatgctaaaagtactccgaccaacagcaaagaaaaaaaaaaaacaacccaaaccggcccacttccggtctcgaacatgcaaagggaaaaagagagaaaagggaaagatacaagatcgacggtgacctcaagatactacggtgtcactggataagtgcaaacggggggaactaatctggagacgggtccagttcatttcctttgactttttaagattagacaagtcagtattcaacggttcgacttatttcggcaacctgcgatttgccgcttcgagttgcgatcggcttccgttggactcacccgaatctgaccagtcaagggcaaccgttgaacacatgttcgatcctgtggatcacgtaatcacggcagggtcccgaggtcaggtgattgaccagcgatcacgtgggaagaattagtcatcctgccctaagccgcccatggctaccaaggccacgggctggttgcaccggagacgagaaggttcaacccggttatggcgagggtcactgatcgcttgtagacaaacggctggtagaatgaggcaatcaagtccatcctcaagcgcgtcaagctcgtccttggttagtaatatatgatacccaatcccagatacccatgatgccaacaatgttgaggcaaagtcgaactcatggctcccatcaagggcttgtctgtttttggaatcctcttaaccagcgagcagatacagtagtgctccaagggcttgggtatgagtcacactcgggaagcggcctgtgacagcaaagcgccagcacgagattggcgtcaccataaattcccgaaatggcgttcaggcgcagtgacgaagaacttggaacacgaagttggcccccatgcgacattctcatttgtagcatggttgcaattccgacatcacaccgcgccaggtcattgccttgcgggaattttgccctgggcagccgtcgacaccagaaggtgggatatcgggcgctctgccgcttcatattataacttcgctctccattctgtaatctcccgtcaagccagtgcttattgtagcaactgacatcatatcatcatcgaggggtgagcctagggtttatctttcaccatatgactgtctgggcgatgacccgaatatgatgtgaagaggaagtccaggattctggttgttccgatcggattgtgggcgaagtctgtcatagcgtgcgtctacaccataataatactagaattcgaacaatatcatgggggtatcaactaaaagaacataatggaatttttaaccggaatcttcgtaggggtttacagtctccgcaaaagtccgattgctcagccagcctattttctactcggtagatagtagatactacttgaaatccaagaaaaagaaatatgcaaaaatggaaccagcctattgaagctttcgattcagctctctgaacccctgttcctagggcttcttatttctccaatcaaatcgatcttcaagctacggagtacttatccgtatcacccgggtgaaatctgggtgaaatctgggtgagacgggccggcgcgatcaccacacgtggctcagccagagtttagtgctatatcattgggtatgagtgcagggtctggaacgtttgatatgcaatgtgctccgtatacatatcagattttccctgactggggggggctgctgccgcacattctattggaatgacccctacagtagactttggtctcgactttgagggtggcttggaatgcgcgagatttgggcaaagtgtcgtttgaccaataatattcaatcggcaccctgcatctctatgttcaaaatggtaaatagtgtgtcaatcaatttatttcacatcgagacaaccaattgaaacatcaagtggttgttggtggctgttggtggctgttggtgcccgagccgaaagggctcctggggtcggggattacaggcgatcagtgttccccgcttacccactgtttcccgtttacctataaataaccttatacatagttagcacagaggcttggcatatgttagttaccgtatttagtgcttatgttgtatgcatgcggtcatccttggcctggccgaaataccgaattgagttgagcggtgagcaccaatgagataggtaggttctcatctacccttgaaaagattatagccaattctggaggctctttgaactcatagcctccattttcaatgctgttcttagtatgtagtgtagtcatagattcattaatgatcttttgcgcagtggagtacattaaacattattgcctagcaacccatcaatcaaataagacctaaacggtgcaagaaaggaaagaaaatagcaagcagaacggtcagaacataggtaacagagggaaaaagcaatatagaccggcaagaaatggccaggaataggaatatcaccccattctacccatgaacctgcctctccccacaagacatcaccccggaaacataatttcctctttgctcagcatattacctatcttcttcttccccaacccttcctcaaaggtcttcccatagtatgccaggcttggaccacatacccagccgctccctctggcgtccgctgcacaaagagcacccccatcgagatatagaatacaccgacaataccagtaagagctccctgataccccagcattcttttgccacgcgatagatacaaggaatcaccaagatctctttgctccccggatgaagaggcgtcaagcaacgcattcataccctgtagagtaccgaggacggtcactagagcgagggcaagcgagaaggcactgaaagtgattgcgatcactaacattgccttgtacgacttctttctggatgtgcctgtgcgagcaacgaggagcataattcccgagatgaaaaataggagggcatgaacgagaggaggttcacagaagaagacatcatcttggaggtgtttgaattgtgggagggtggtgttcagaaaggtttgaacgtcggattgggcactagagacttcgtggtctaggtgctcccaaagttcttcgctcaggtcgtccagatcctttcggcgcatgttcgagacgcagttggtgaacgtttgtgcggaggaattgccatcggaagaggatacggcagctgcatcggtgactgatagacatcctcctacatacagttagatgggacggatcttgattaatgaaggatgatttggcctcttgtccactcaccaaagtagcccacccgaagtgagatatcgtaggtcgtgtttgttgagagctcagcgaggtagattttattggaatctgccattgtccaggcgcagctcgtcagaacataaactggatgccgttagaaaatacactgtatcacgcattttgtctaaacttacgacccagactgattgccagtagataggaggcaaccgctagaaacacgagtgcacatatggatttttttcctcttcggttaccccctactataacgcatggaccgttagtattattctcaagatgttgcagtcgccaaaggaaaagtcaaatttcttacttggtttctcaataaccaccgtctgtggaagaggcgcataattcggtgcatactgagtgttcgtgggataaggattataaggagcggcaaggtgaactgcactggtagacgaagttggctttttcttgccagtggacttctttcctgtcttctttaccccagtcttcttcaccccagtcttggccttctttcgtggaagtgttgaggagctatagttctccatggtgtacggtaggtaatgtaatggaataacttcagagcctgcctttggatacgtctttcaggctcacatataccttttatataccccagttaaaccagggaattcggcctattggctggatagtaagacgtatgactggtgggaagtaggttctccccgaaagtctatccctcgtatacggacttggcagaaacgtgtatcaaatgggggccaagcgccatagccctaacaaaataatatcaagcagtagcctagcctcctagctcgtgtcttcgaaaaaggaaatatcgaaagccaagactctcaagcgggcaaaaagaggggtgggctgtgttcagcctcaacacatgcaatttagacctgtaagttgtaggcccgactgggcttcctacatgtctacttttggttgagttagccttggcaaacggaggctactagtatatttcggacgaagtagttcaatatacagttttggtctattgacgtgatttgctcctacgtatcggtacatcgtgtattatgaacatggggtaaatctagctaaacgcactcatcaggaatcgatagcacgtgaaagtcgactcgacatctcctcggaaggttcaggatcaccagacaacctgtgaacttgtggctgatgcatatgcagcaacgcccagctaatttaagacctacaggggtggtggtaagatttttcttcccacgtacgatactatcttaggaagtgcctttatggatactattttggagatatggcaagattaaatcacactaaacatagcccgagaaacgggacaacagttggtcgctttatactccttagaacggtggaggcttagcccgctggtgtgacagccactagctcagcctcggatcattcacctgggcatacggctcaagagaaactagtccacacctccgtaccgctctcccgggacttttccatctgtaggtcataaggccgcgaaatccattgtcctacatatttctccatgcccttggataagagacttggatacgcaacccttccctcccaaacgttttgttgaattttacgtcaaacatggctacatatatggcacccattcctcctagcggacaaggcctaacggcaaggcttgtgcgccaaacaaagattccaaagcccgacaagcacgacgagagcaaggccattgacattgtagccgtccacggcctggccccttgggagtcttatcctgacacttccttctggctgcgcgatttcattgcaaaggacattcgtggggccagagtatttacatttgactacgatgccaaggcagtctggttatgcgaattgcctctgaagaatatccaggatgtgtccagggccttgcttggccaaattgctgctattcgggaggatgtccccgagacacggcctctagcattgatctgccatggcttcggtggctttattgttgaatcggtgggtctttgtttcagcattcctttactggggtattatatagctaacaaattcctggaataaagtgcctgaatgatgccttttcacaattcccaaatacaatcgattgcactcggggaatcatcttccttagtaccccacaacgtgcatcaccagggatcacgtgggcgacgctcttgctgcgttgcgcgagagacagtatacgtacacctccagggctgacacaggctgaactggcatattcgcaagaccttgtgtgggcaaagagaagtggagttgttttatgcgatatctccgagggcttcaaggcaaaggttaccaagaggatgaaattgtttttctgctacgaagatgttccgacatggccacagcaagaatgtgtaagttctaactcacaagctcttgggtaaaaagggtggtatgctgatattgcctatagagtttgaacgagtattgcgcagctcttggtcgtcgtggcgagaaggtcgagttgatggcgggttgtagtcacctctccatggcaaatttccaaagcagggaggatgagaactacaagacaattatctctgccatcaagaagatccgaaagttggcattgaaagacacagcacccacttcatctggactacacgaaacggctcaagaaattcagaacctccaggtcatccagtcatcccaggccacgagtatacataccgtccagaacacttcggtcttgaaccaacagaatttcagcttgcagaatgcagtcacggctacccacaatacatttggtgctcgtgaattaagccatggttcatcgcaaggtaccatgatagcgctcaagaagtcaggaccggcctatggcaacatgcaggatgcgtcaagaatatattccgccactccacaatcctcgcaatttgacgcgaatatgatgaagattcgcaggcgtcctgttggactgtcccctgtcaatcaaatatcaaattcacctggtcacgaatctcagcctaacataccatcacaaaatcttcaatttacatcgggacaattgggacagcaaacacagcactacgccaacattgcaccaatcactgcgctagaaccgaaatcctccaccaaatcaggcaagaagcccaaaatgccacaagaagccggccctccacgtcccgcaaaactaccattgaaccccggagatgcggcacccagaccagcagtcgtccgccaacttatcggtaacgaggggatgctctccacttcaagcaacattcacagaacagaccagcaaatgcattatacaaccataaatagcatggcaatgagttcatcccaacacatctctccgcagcctagttcagggacatacaactaccctccagtcccgcatccattccccaccaatcatcctatgactcttacagctggagcaatgcctgttcaactgacatccccacagaaagtgacaaagccgccgaaggcatcctcaggcgagcaacgccccgaacctgcaaagctaccagggacaaacccgatgccacaccagatgcgccccaataaggttgattcgggagttagaggacctccgatcccgactaccacagctggaaccatacccaaagtcgctccaatgcaggcaccccccaccgtacagcaaggcctgcgggaactgcagctacagcctagctatactccaccccccaagaagcccgggttttttaaaaggattttttcgtctagcaaggaatcggcacctgtccctaccacaggaggtcctggagtgcgcccgggaatacaagtcggtccacaccagccgtccgggcagaccagctggggaggctctgggttacactcggggcctcaagtttcacaccagccattgaacccgtccaagtcatccaaacctccatctggacctaccagtttgggtggccctggagtatactcggggccacaagtcggttcacaccagccactgaagccatccaagccttcatccaagtctccacccgggcctaccagtttgggggaccctggagtacactcgggaccacaggtcggtcttcagcaaccgttgaagccgttgaagccgttgaagccgtcgaagccggccaagccttcgtccaagtctccatctgggacgaccagctctagtggccctggagtacactcaggatcactaggcggtccacatcagccgttaaagccgttaaagccgtccaagccatctaagccatctaaaccatctaagccttcatccaaacctccgtccgggcctcccaaactggtcggcccgggagtgtactcggtatcacaaggcggtctacaccagccattgaagccgttaaagcagttgaaaccgctgaagccatctaagccatcttccaaacctccgtccggaccgaccagtttgggaggcccgggagtatactctggatcacaaggcggtccacaccagccattcaagccgtctaagccgtctaagccgtccattttgggaggttctgaagtaaactcaggatcacgaggtctttcgcaacagccgtacaagccatataagccgtccatgccgaccagcttaaggggacctggagtacactcgggatcacgagatggtccatatcagccgtacaatcctctatcacatacgcacttgtcaccctatggcccgccgagaccggggcaaggcccattgatacatggtcacaataataatgaccacttcgggccagggcaacatcagacttggggtcacggtgatggttttaattttgcaccaggtcaaacttctagtcacattactagtaatattccagtcgaacctccagctaagcccacgggttcggttgaacctacaggtccaatcaaacctccaggcccagtcgagcctccagttgagcccacaggcccagttgagcccaccggcccagttgagcccaccggcccagttgagcccaccggtccagttgagcccaccggtccagttgagcccacaagtccagttgagcctacagatccaatcaaacctccaggcccagtcgagcatccagtcgagcatccagtcgagcatccaatcgagcctccagttaagcccactggtccaatcaagcctccgggtccagtcgagcctccagtcgagcatacgggcccagtcgagcctataagtccaatcaagccaataggtccagtccaacatacaggtccggctgagcctataggacgcggtttcactcctgatgagagtcatggccaggcctggaagcccgatcacagtcgcaatcaggctcaccagtcccagtccctgaatcaaagcagtcgaagtggaaatatagccgctggccttgcaggtttagctataggtgcgggtggtgcagcttttatggtggcttccatgggccaaggcaaagaaaatgacgaaagcaatgttaacgatgacaacaaccacgaaggcgatgatgacagtgatagtcagggagaagggggaggtgatagtgatagtgacagtgacagtgacggtgacagtgatgaagatgatagtgatggtcaggaagcagtgggaggttatggtgacagtgaggaagagggtagtgatgggcaggaagaagagggaggtggtgacagcgatgaagaggatagtgaagagggaggtggtgacagtgatgaagaggatagtgatgagggaggtgattaaggaggtggtgacagcgatgaagatggaggtggtgacagtgatgaagaggatagtgatgggcaggaagaagaaggaggtggtgacagcgatgaagatggaggtggtgacagtgatgaagaggatagtgatgggcaggaagaagaaggaggtggtgacagcgatgaagatggaggtggtgacagtgatgaagaggatagtgatgggcaggaagaagaaggaggtggtgacagcgatgaagatggaggtggtgacagtgatgaagaggatagtgatgggcaggaagaagaaggaggtggtgacagcgatgaagatggaggtggtgacagtgatgaagaggatagtgatgggcaggaagaagaaggaggtggtgacagcgatgaagatggaggtggtgacagtgatgaagaggatagtgatgggcaggaagaagaaggaggtggtgacagcgatgaagatggaggtggtgacagtgatgaagaggatagtgatgggcaggaagaagaaggaggtggtgacagcgatgaagatggaggtggtgacagcgatgaagatggagatggtgacagtgaggaagagggtagtgatgggcaggaagaagagggaggtggtgacagcgatgaagaggatagtgaagagggaggtggtgacagtgatggagaggatagtgaagagggaggtgattacagtgatgaagaggcagatggtggatggtggtagtgatggagatggaacgtagccctagttttatatgtccttgcatctatctgtatgtcgatgttcatatctgtactccgtattgacaatcttcacttaatgcgctcatacaaccctaaaacccccagacaattatgtattcccatccttgtttacattctataaaattctataaatccttttgtccaaaataatatacagttatatacatagtgccaatcaggccctatttgatcttcaagccagtagggttattagccccattgcatagctgcgcctgggtcaatgtcccacccagagctcggctgaaggagaaagcagggagcttatccggaagcttctcatacttgatcgcgatatccaacagggtttctgcggaaagaatgcggagtcgaacaccgctcaaatcatagtccacgttctcctggtagctgaaagctgggtctgaagttgaaccatccggcaagggcatcggcccatagccaggcttgagtcttctttcggcaaagttcgcaaggcttggaatatcccgcacatgactattgatagtctcattcgggaaaagtgttgtaaggagttcggcaaccggcatcttgttggacacaaatgctaacagtccataataccggtcgaggactggttgtaccattgcgctcggtaggtcaaaggccttcttcagaacgggcgggttagggtccgcttcgaaatatatgactccgcgcccgctcccacgaggataaatctcctctgggtcgatgtataggggttcaaatggtcgtcggtcatgtaccaggccgccatttttgggggcttcaaccgagcggaagcgaagatcatcgattgtgaaattatgtttttcccatattgtccagtgagaagttgagatcaaagtagtataacttgatttgagagatattatctgatcttccagagccttcagactctcaacactctccttaggatccgcagccgcacgtgcaaatgaccggcccatttcgtcaagcttaatgattatgttgacaagcttttcgcgaaactgatgggctgaattttccctagtgaggtgcgtgaatgctattcctcgccgtcgaatgatggctttgatattggggtctgtggtctcgtggctcgaagagagaccgaactcgtctgctgccgcgatgtccgccaagagcctctggtgaacatcactaagcactcgcggctggtttggtatttcttttttgccgcggtgaacaacttctggcaccagctttaacggaggaagctctctgtcaggtggagtgataatattattcgccgcagctctttcagccacgagcttcctgttgtcatttaagtaatcccagccttgccatcgaagggagttttcagtttcagctggagtggcaatctctatgttgtgcaagcctatggtctccgcaaatacaccagttcgtgtgcgctctgtagtggaccgaggtagcatattcgagactccattgaagggcaatgaggcaatgactcgtacggccccgtacaaattcaacccattctgttctaagcagcttttcatgaagctgagaaaccagcggttgggtttgaaatgatccgtcggagagacagcatcaggcagattagccatgatgagaagtgtatcgttccttggtataatcgcagagccttctcggtttccaggcccttgttctggaagatgagttgcaaagaattcagaccaatcggctttcccatatatgcgatcatcgacgagcttataacacggcttgctcttagcgaggcgtgtgagaaggccgtgaaaggcatgatttggttcaacaagaatatggcgacgtggtttaatgagttcattcagtctagatgagcagaaaccacccccaggccaaaggtccagaatgtctaccggcgggtttcgacgaaggtagggagatacgcgctcgaaaacatggtctgcaaagttcaaggcgtataagcatatttgtacccattgtgtataagagctgagattcaagacttgcctagtagccctggactcacgtattgcggttgatccttggttttcccacgttgaaggcggatcgccgagtaaagcgcctccgtgaccggaaaccgcgccagcggcattcgctctttcctgattcgcctcattataaagatctggcaaatgccaagatgattcttgcgtatggcattaatggaaggagagtactaattgaagggagaaatgtgagggaatccctcgaaatttctttgacgttgaagagcggagagcggagagaccaagcttcccgctctctcatcccacctcttctcccctcaccaggtttatcttccaggtcgcctagatgcggctcccacaattgccgctggtctttccaggtttcggagattcctatcatctcactatgctctttgaggcttgatcctggctcaaattcatcattttggctttctaattctcgtctacccttgccttagcgcaccttttttgttatggcttccaatgcgataggaggtactgcccctcaaagtgttgagcatattacgcggatagcacagaactacgagtacaactcttcagttcctctgcggtactggctgaggaccgccgcgacgcttttacgtgaggttggttatacctgttgcctgcacgtggatatcgattactgcagacttgttgacttttcttcatttgttaggctcacatttatgaacgcgaaggacacgatgagcaagcctatctcattctatttcgacacgctcagttgatcctggtccatctttccaagcaccccgatgtcaaaaagaatgaggaagatcgcaaggcattggtggcagctgagaaagaggttgagaaaaatcttagcaagttggagattctgcggccgcgtatcaataagcgctatgagcgttacactcagttgatgcgggagcgcgaatctcgccaacagccctcacgagccaaaaccatccccgaaccacgcgaacaagttccggatcctgctctcgccggcgtggcagagcctttggaagctggagagaatcgagatctcgccgtgcagttagcccaatcagagctcaatcgccgagccaccatccgaaactcaaagggtctttctgggccatctgccgaggagattgaaacacgtcgcgcagctggcatatggagggagtgggaccattctatgaaatcggactctcgcacgggtgatcgcgaccacacaaatcaaccttatagtcaaacccccgaagagtccgaggttccttcatcggctgcttctgcgtacaagtatccaactgtgccccgtcaaaagcccctggaacccactgtgtctccaggccaaattgccatactcgataagaatgccgaacgctttgcgcctccgatattgcctcccaaggaacaccttgagcctagccgggcatctattatcgatgattctacaacggctgtggtgccatcgcgaccggcaaaggtattgccaggcccggtgctgcctgagaagatccaaccttctaaacaaaccaccgccacgcgttcagatctcgatccctcaagttacaccttcaaaccctccgcctatctcgaaaatggcacccccttgcgctcggtattcttaccagcgaacctccgatcccgctttttatctatggctgcttttaacacccgcgccaaccttgagacatgcggtatcctgtgtggtactcttgtttccaacgcgctcttcatatctaaactggtaattcccgagcagacatcgacgtcagacacctgcgagacggttaatgaatccgccctcttcgactactgtgactccgaggatttgatgacgctcggctggatccacacacatccgtcacagacctgtttcatgagctcccgtgatctacacacacactgcggttaccaagtgatgctccccgagagcattgccatcgtgtgcgctccgagcaaaaaccccgattggggcgtattccggctgactgatcccccgggtctaaaaacggtcctgaactgcaaccagaccggtctgttccatccacatgccgaggagaatatctacaccggggcattgcgaccaggacatgtcttcgaagtcagtggattagaatttgagacggttgatctccgtccggatgccttaaagaattaatagcgttgcgcttgaattgttcaatacactgagataccatcatcgtcgcattgatctggcttttttcgtgtgacatttcatatcttctagaagggtcatgccatttcaatagcgttaaaacttgctatcatgagtttccaattgaaatatttcctttctgatccatattgaagacatcagcatagagttggtaggttctgctcagatatatagccaagttcaaccttatttgacgacatttatgttttcagtgacaattagtgtatcaaaatactatttagtaagacaattgcaacttatatgtgtatttgatctcattccataggctagagcccaatacttcattgttttctcgtaatcatgccacgccttacaaggatggccaggtgtgacatcttagatttccccacatgataagtcgataaccatctcaacttcccctccgcattcgtacctctaccatcagcttaacatccttcgtcaattgattttgaattgcacgaatgtcgtccccatcacaagaaaatatcccctccgacacccccacctcctccacctccactccaggatcaccgtcccaggcacccacagaaaaaccaccctaccaatccgctgcctcctacttgtcctacccagtcagccacgtcgtctcaggaatctatcgccgcatagcagacccagagccaactaaagaaatgccctccgtcatgccatggtcgcggtcctcctcatctgaagcgttcacaccgcaccgaacagcctcacccttccaacccccaccactcacacccctcaccctcgggatccccacaggggccgactcgctccagcagcaactcctgacacgcccactagcagaagaaatccgactgctagtgccgccccgtctgcagctcgccgaaacctggcgtctagcctacagcctgaaccgcgacggcgcctccctttccaccctctacgagaactgcgccgagttctcgcaccgcagcccgcgggcgggctacgtcctcgtaatccgcgactcctccccctacagctccgtcttcggcgcctacatgacggacgccccacacccagactcgcagttcttcggcacaggcgagtgcttcctctggcgggccagcgtgctcccgcccccggcaagcttccccctcgcctcaccaggcgaaggaccccagtctgaggaagccctcgagcgcgctggcctcccccctcccccctcggccgataccactaccgccggccgctggagcaccctgcgcaacgacaagtcgaaacctgcgcgggcggaatcgccggctcataatctcaatatgaatattaaaactaatctcgccgctgcgagtggcggagtcctggcgcctccttcgccttcctcgatccatagcccttcaccgagtggtgcgagtacccccgaacgcattcgcttcaaggctttcccgtacagcggggttaatgattacatgattttctgcgagactggatttctcagtctaggaggcgggtaagtggttgacgttgctagaatatttatttttcttggctaatatgacgtagtgacggccactacggactgtggcttgacagcagtctcgaaaaaggtgtcagttcaccctgtcagacttttggtaacgagcctctctccgatgaaggcatcaagttcgatgtacttggagtggaggtgtggtatgtcggttcttgaacagccgcatatgtacagcctgacgccttacacttgatgtataaagaatgcctgtgtcggagaggacatacgtatggaagggatatctattttgatatagacagggccgacaggagcggactgtggcatccatcgagattgaagacccggatcaggaaaagtagttcatcttaatggcccttcaaatacccagacggcgatgtggtgctggcctccctgcattgttgattctgctattgacatttgccttaatctagtgttgcttgttttgcctaataacttttgtcttgaactttggataattcacacaaacagctttgcttttttgttatcatcaagctagatgtattttctggatggtttcactcttatatggcaattctttcacaataccgtcacttgctactcagtgttaattcagttacgcgtcaaaaagcactactcagatcgaaagtgaggaattgaaaagtaacggtttctattgctgattcaggaattctgtttgaaatccctgaaccaggtcaggaaggctgcttcgaacatggtccacaagaagactgctgagacgacgccgcaggttgccagcccccacaaattgccgtgtcagtgtcttccaatctcctcggtcgaagaactccttctccttctcctccctctcctcatctagcaagtggcgtgtctcggaagacttggtacacaccaagtgcaaccccagtggcacttcggatgccgatctttaatggcattcaaccataacgcttcctcctctggctcctcgagtgtgtcaagatgggtgatgatttccaagatccttcctcggttgggatcatacttgtcagcgaagtcgattaacttttgagggcagatgtcgattttggcggagaccacggggaggatgatgcaccgttgattcagcacgtagttttcaatcgtccgacgactaggagtcttctctcgacctccattgtcgatgccatctgcgaagaagagcctgggcatgtcgatgagagtcaggtcaggtttatcgggaccagagacctcaactctcatgacatcgtcactgaatccatcctcgagggagaatttgacgagttgcgttgcttgctcaatcagcgcgactgactgctcagtgttgtcgtgaacagggggatcaaatgattctaggtgccagaggtcgccttcgcttattctcgttgggccaggccggatgctcactttgaagcgaggtgttgggtcatagcgtagtatgatctcagtaacgaagccagtgtaaaagtcattccttgatggaaagctcacgccggaaattgattcaataacagagcgtttggcgttggacttggaaccacagatgatcatctgcggcaaatggacatatttactaacactgacggtacggagttcgtcgacgatgtcaaggatactgccttcttctgtgtatgactgaggtggagcttcatctggcttggccggcatggacatggtaaggtttggatgtaataggtatgttggaatgaagatggaacgagccgtatgtatttgatggcaagaaggatgatgaagtcatgaagataaaagatggaaagaagaaaggaagggaagaagagtccatcttatatattggccttatacgtttaacgttaacagcgtgcgattcggcgactcatgcgagtcatagatgatgattatcgcgatgatgcgatgcgatggacggtcatgcgccttgaaatgccctactcccgcgttttctttcacacttctggttaaagctattagtcgtttgttccttgctctactcaaaggtatgtagagacaacaatgctcacgtttctttatccccgaatggtaattagggcattccggactttatgtgagagcaaaatatattggacgatatgctaactttagggactttaagaataattgctgcttagtatctaagacctctgttcgctttgcatttctttgtgaactagagctataaggacttcggatacttctcaacagcctcaggtgctcgccgccttatccagcaaaccacgatcaaagtaacagttcagctgccagatttgtaggccatccgtgccgcatccctcctcggatttgccaatctcataaacaaaggcttggggcagaggtactattccccttccacctttgagatgcaagttgttcgtggtctcaataatcacggtatgtttgccagacgtctcatcgctcaaaacgacgattgaaatcacgtcatgtgcacaacgctcaaactgtccgtagagatcgatgtagtaatcccagatctctttggccccatggatgatagaccgatcagtgttcaccagggtcgcactggaggcgtaatatttggttgggggtgtggtcgtcttagcaatgctgaagtccactgcatatttcatgtaccatgagaggactggattggtcgaaaatactgagggtgggttggcgagattcaaaggccctttgaccacggtagtagtgacactcatggttaagaatatacccaattgaaatataggctgtgatcaatggagaaaaatcgtaagagagagagcagttcaaattattagtatctaaaaggaatatcatgatatcaaagctgttataaccctcggctcgtcgtcgggatgataccgaggaacatccgacctcgggacccgtgaatctcgggaatcccgactcaggatgacgtaacccgtattgattcaaacacaccagcatgaaggcagaattgaattgtaaggcagaattgaattgtaaggcagaattgaattgtaatcaggggaccaagttaaattacatttatatcagctatgtaccatggatatcttggtagctttcaaggagctttgacctcgacaagcagttttcctgcgagatgtttagtataaattcattagtgtgcagaaatcaaagcttacctgtgtttacccccttatacagttgcatcaaggcagtttcggcttgggataacccgccatgcacaatggtttccctccgttgcaatcgaccctccgcaagccactggctgagcttccgtctgatctcaggtttcttatccatatgatcgaagacaatgaagccttccatgcgaatccgcatcctccatatcatcatgtagttctttggtcctttgacctcctgttcattgtactgactgactccaccgcacatgacaaatcgagcgtttttgttggcacagagtagagccaagtcgaggacttctcctccgacattgtcataaaagaggtcgatctttccttgcatcaaactcttgaacttttcggcgaaatcttcgctcttgtagttcagtgccccgtcaaacttgaggtcctcaactaaccaacgacacttttcatccgagcctgcgattccgtacacagtggcaccgtggatctttgcaatttgtccagcgatagacccagtcgcccctgctgctccagagacaaccacaaagtccccaggcttgacatggccaacctcaaccatgccccagtacgcagtgattcctgtcaagccaaggacgctgagaaaatcggtcaactggcctccatccgcaggatcaggcgtaggcacggattccaaagagctctcattgataattgcctgctcagtccaacctaccataccgagagcataggagccaactggaaacttctctgaccgcgaggcagttacacggcccacagcgtagccacgcatgatttcgccaattgcaactggaggaatgtatgaaggtcgatcgtccaaccacccacgcatcgcaggatccagacttaggtaaaggctttccaagacaacctctccatcttcaagttcttccgaagtaggagttgtatgcttttgtacagcaaatgtttccccggggacaatgtttgtctccgggcgctgttgaagatggattgcgatatgttcggaggacatctgtagataaacttgttatgagtatgatgaaaatcaaagcaaggcctgtaaaaccgtactgttcaagcagtcgcttatgcgacaaaaatatatttcaaagaattagaaagcgatagcctaacaccgttgtacagagagagtacgaagtagacaagaataaactgtttctgtggccccttcgacaggacataccgctttatcatcgactacgcgctacctcgggaacatcccgagatcctcggattatgcagccgctttacccgtacggagtaactatacggttggggtgtccctttaacaatcccctatatatataagcttatataagtcatataatgaataactatctacgtcaggatacatctgtttcgatacggcatatgatcatccggcaaatagacttccttatagttcgggaccccccaaggatccccggcgatctagcatcaggcccctaggtagtaaccaagaaattgctacctatcagcgggtacatggttctattctgataactaagacaattgtagtattaaattagccagctgaatgctatgggtccgacaaaagatgaaccatgccatcaaatctcctccttttcatcttcttctgcttctgatccattaccgtcgcctgtgacgtgccgggtcttgcaagatagaagagtgcattaaattcagaataactaagatagggagagaaaggaaggaagcaagttgcaaggtaggaatcagccagttcttatagttgagtcctgaccgctttgtaaaagatgcaaacaaccaactctcgcttagcaatagcaaacaagcaaaaaaacaaacaagcaagcaaacgttggatcgtaacatcgccgaggggacatcaccttccccttaatcagtcacaccttggacaagtagccaatcatcatcagcgagctccgtgtctgggtgatcatgtgttggaagatccaagattaccccagtgtattccttcgtggttgccactgggatgggccatgaccatttcgcaagcatattgagcatgtcataaagcttgcccttgtcgatagtatcaatgtacggcgtgtcctcgggcggtattacggcgtattccttgaaatccaaaatgcgggtgaactgaacatggacttgcccatcaaaatatccagctaggacccgagagtgccaggaatagacgagggtgaaacgtcgccggtctcgatatctagatgatgaaactggatccgaaggtctaatagtttctcatcggagatgactggattgtagtcaggtgagtagaaatacaacgatttcgggtccgaaggaacaggacgtagggctcggagaataacccaaatctcattgccggcaagcgcaggacgcccctggccggtgtctagcttaggacgtccctgatcggtgtccaaattgaaaaaatgatccaggtcatatgaaccagtttccatgttgatgataagcgttagtttgtatgagagtgtagtagaaagacacaaagaatgggtgacgaggctgtgcgggtaaatagaagaacaccaatcggcgtgaaaacgctgctaaaaaaaaggtgagtccttgaaaacgaaatcccatctagattctacgtcagaatgggatactagtcctaattcgaacattcatgctgctgaattcggtaaagtaggttatggtcctcactgatcatcacgtgatggctctgagcaactcagtgagtctcccggactgatatttactcgagcctgactctaagcgccctcataaaagcggcagctatgataggaaagccccaactgacagagatgatctttacttttcgcgagctctgattcggggttttgatatactagtgagcgcatactatttgcagttgacaggaattcggttgggattcggatgcagaggttctttgtgaggtcattctgatgcagagctgtctgcagtgcccctggattgtataagcttcagctactaaaccagatttggtacctgtctatagacatacacttctctttgatcatttcatttcggggtgtctcatcacctactttcatatagtaaacatatatttctctctgatctccatatcgccaaaatggagcaacacgacttactattcattgtcgatgcgtcaagccatgaaaactgctatctacaatcgctgaacatctctctccctcaaataatttcgatttccgatcaaaagattctacataactagggaacgcaagtgccatacggccgtcaagacagctctgtcgaaaccaagggtctcctgctccaaccgtccagtgtaaaaagtgctcaaatcatatgatctggcccgaagaatacaggccttccgcgttcaaagagtcagacttcatctgcccctcttgcacgtcaggccttgtcccaacagccaagattgaagtcacaccatatgcactatcagccgagaacacatactcctggctagtccaagatgcaaatgaccagcaagcatggcccttccgggacgactccatcttccaaaccatcagtagaatgggcagtgaaggattcctttccagaatcagtcttttcccttcatctaagtcccagctacgctacaatggaaaactgatccacaattctaaggcgctaatttcaatcctccaggaccgagtcgcaatcagcaaagcaagcaacgcaaaatgttcgatgtgtttccatagatatatgtgcttatacccagcctgtggacgggatggctgccgccaaaaaaatgtgtagcgtctgcctggtagtgtggtacaagttcaactctgccggctgtgtgatcaaccctgcggtgctgggatgtccgttctgtcgtcgataccccactcttcgcctagtagtgaagtatggattgggtattcatgcagttgaatattttttccaagcagtcggtaggaagggaaagttcatttacgcatggtgcaggaaatgtaatactgccaaggtggtgatggagcggagttgtatgcttagcaaatttcttgaattaacggactgggtttgtgatgagtgtcgcgaagctataaagagaaggcagcgccagacggtagataatgactgacgaggttatcaatggacaagaaccctccaggataagtaatcaatgggatatttcacttgtgaattgtctgaactagctagctaccttgcaggaaaagatctcgtttaatgagtaccacccttgagctccaaactaatatcacgtaagaaaaggactctcaaacaatgggagacaaagtactgaatgtgaagaagaccccatgtacaggagatctccagcggcgttagaagagcagaaaaccccccgcaaagaaatcacggtattggaaagacgggaaagcacaaaacatcagggggtatgggtaatggtacaaaaataggaaaatgaggggccgatgagagactggggaaaagcatttgcagactaataaggcgagttgacaacttcatccctaccaagacgactgctccatccactgcgcgcacggtttggtgtggcaggaccagcgatgctctcgcgcgtaggcttcatgaaggtacgcttggcgaccatgttgacttcgtttggcagagcaacgatgacattcttgtcagagccgaaccggaagttatcagccatgacattctcaccataccgcttgatggtgtacgggtccttgcggttggcaataaccttcttcatactccatgtaatgatgaagggaccggtagcggtgacgatgctagtttccgttgagtcgacaccagtgttgaaacgtgccgtggtgaacgaaagaggctgtttcgtctcgtgctggaactgggcaacgtgtgcgggctgcaagccaagacggcggggttgaggctttgaatccttcgcgaaagcacgctcgaatccgagcttgccctcatttttgccttccttttgaagcgaatcaatgaggagaagataggtacggcaagttgccagcacccagcgtccatctgcggacacatcaagaccgataattggctcgccgagagccgggatatgagtcttagcattgatgcccagacgatcgaacatgcggatgtcacccttgttagaagcgacagcaaggtatcctttctcagtagtagccatagctgagaagtcattcttgctggcgtattgcttgagatcagaatcgacaagcttgttgccagagagacgagggtcgatgcggaagagggcgttcttggagacaccaacgaatggctgcgccgcggtcatttgcgcgaatttctgcgtgtttcgttagtttatccagagatagatttcagatggcgagacaacttacattctcgggagcgaatgtctccacggcgatatcgtcatggaccttccattcgtcgatgattttgccgtactccagatccatcttgaacagcgagttgggatcatctccattctgaagaatcatattctgatcctcagcatggagcatgaccttcttggggctgaagagtttgccattaggggtctcgacctttgaaatagtcgtggagaactcaaggttgttgtgagcggtgtgcttgaagacaccgatcttggacccacggacaacgaatgatcgatcatgcttatagccaactgccagttgtgagttgatgtttccgtctgcgtcacgcgtgacaatatcttcttcctcttcatcgctgtcatagtgttcactgcgctgagcatcgtcctggtcgccatcgtattcctcttcggcctcttcttcttcttcctcgacctcttcctctggcttgtcttcggaatcttccatggtaaggtcctggaaggcatcaagaacataatctctgtcattctccttgactttagtccacttcaactcgttcagctgttcccatagcgcctgcatcagaccctcctggaaccgttcttccgaggcttggtccttgaatcgcaggagccatgagtacgccgagccatcttcactgtagtggttgaagatgaatgaaagatactcgaagttaaagacagggttgatatcggcgacgacagcttgtcctaaccactctttatccttgccagaaatctggagccagtactgccaagtaccaacctctgagacagtcgcaacaatttccgactcctggagcacaaaggttccagtggaaaagtcgaacaaatgcagctcggccttttccttgcagagaatctccttggcttcggggtgggctgcagacggcggggcagtagtcggttcctcctcaagagtggcagtcttgatctggcccttggactgagcgtattccacgtcttttgtcatcgctgcaactgaatcctctgccgtgaaggaatttctggtcggcgaagagaccgggctcgcagttggaatgggcttctcttcgtcgtatgagaactcctgtaactctgcctcggtagccctctgtgcgctgcgacggtgcttgcgttcgtattgacactggagggcggcaagctcgaaagtggcaactttatccgctgggaccgaagagtcgcagatgaattcaaagagatcaccagcgtcgccgctcaggtcatcccaggccaatatctttgcgcctccgtcgcggagttcagagcgaaagtggagggtctggtccaggaggaaaaccttctcgtccttatcgaggccgtcgccggcgccttcctcgccgtcgtcgtccgcaagttcttcctcgccctcttcataggctctctggatgacaagctggtattggaagtcctgtccggtacgtcggatagtggcagcggcgtccttgaagataagctcagagtagcctttaggcgactgtgggcggacgagatacagctcgccttgggggatttcgatgatggtttctttcgaagcgtcaccaaacaaaaatttgctcactattgaattagaagaaaaggcggagatcagtttactagtcaaaatactaaataacagaaaaatggccttatatggaggagtttggcggggcatgaaaagcgcgttgcttaccgttgcggagcataaacatggttgcgaggggcagctgccaaacaaaaattcgtgaggcagttgagaggaggaaaagaggtaagaagaactgaaggaaaaatgagataggaaagagcggaagaaccaggcaccgtagcaaagcctcttctgcctatgagaaaaggataggaagaagcaaaagcaagtcttctcaagtgcaataatcacaatgaaaatcgcttccgtcatagattgcagggtcgtggctgttgtggctaattgctgaggtaagcataccgcctgcctgggcaacctagtccggaataggcaatatgctttctacattcatggctcatggatgttctatcattgttcactgtcttttgttaccttctagtcagaatttacagagctgggaaaggttagtgaagcattaaaaaggaacattaaaaaggcatagcagaactcaagtagatcacaccttgtacacgacaaccgataccagactattgatccaagcttatgttcatccatggatatctcaaccgctgactgcctccctttgggcattaaaatatgtacaacatgttcgttggatagttcacactattctttctcttcgttttcgtcctcgcttccttcctcaaaagctgcaatctcctctagctgtttcatctgttctgcttcggcatcttcttcgttcacatcttcatcaccattctcgacatcttcctcgccccgcttctgatctgccctcaaagcgccacctttccggggagggataaccttcatgaacgccttgccccagtcacgaagttccaaccactgaagcataatctcaatgacatggttggtggccagtaccggacgatgggccatttgaatgtactgcccgataggcaatttggcagttttgatgccctttgcaaccgcttccttgtaacaaattgccttgtgtcggtttttatccactagcgctccaacaatataagtgctgtaaggcttcagctcagtcagagtattctcactatcactgctgagatatatgatttcaccgtcctcaggcttcgcatcagtttgttcagcgaacggtccggcgagttgacctcctcgcggggctgtcatctgttgtttggccagctcgccagcacgtacaaagtcatcctgtagaaagcgaacccgtttccagttcttgtggcatgccagtacggtgtcaaatcgctccttcagtaatttgttgaatgacgagaatatcatgtgcccattgtagagtgcgcggctgttgtctgagtatgagcgcgtgagctgaccagctaatgagatgcgctctctatcagacatcagatcgtcgtagccgcaatccatgacgaatgtaagaggtaagagtgttgacttggtgtgcttggcttttttgccccgccataagaccaggagcttgttcgcagcttcctcgccgcctttttctcgtgcctctgcaatcatagctttgcgacgctctcgcttttgtatgatcttgtccttcttctgggacttttgaagcgcgcgcttttgctggtgagcttccgcacggcgtaatttcttcatttgatttttcgacattacagccggggccccctgagcatcttgagttgtaggttcattggcagtttttgtatccttgtgaactgtgaattccgagagatcgagaggttcgttgccaatctgagcgcacgcgggctccggctcgttgctggcaacatcatgagcgccagtcatggccgggctgagctcctcgtgggtggtatcttcgtcgtgatcgagtttggctaattttcgaggccgctcttgctcctccatagtggtatagtggaattggcaagcaaaaaataaaggtgggctgtcgactgactgtagatcaaaagttcaaaaagcgcccgccccgaaactcatcgaccaatgacctgcgccgcagccctcattactgtgcacaatccacgtgactatccagacccaacttctccaatcgtcacagcgactccacgctatccctctaagccctttacccgctcattaccgtcacaatgcctcaggatatgcccccagcggggggctacgctcaagtccagtacaaggtaagccatgcaaccgagtttccgggcacccaaggccctgcgcacccagcacacagacatccaagctaacggtttcgtttcttactcttcatagcggaacctccctgcccgcggcttcaagcccgcctactacatgattggcatgcacgttatcatggtctacggtttctacaagtacttccacggtgtccgtgagcagcggtacgtttcatccagcaagagactcccttcctgcctccgatcgatccgagagaacgaactgcaattggaacccgatgcgaacctgctagttgaagaaataagcgaattcaatggctgatatgtgttttaacgatagtgagctggcccgtgagaagatgtggtctcgtctgcacctcactccgctcctccaggcagaggaggaccgcgaccaggtccgtcggcactacgccgacaaggcgcgcgagaaggagcttcttggtaccgattccaaggtctacaactccgaccggtatgtttcatgaaagcgcagttggacgctatgtcattctcggtttatactgatttcgcttgccttgacagctttatccgccctaccttcgcctataccccctccagtctcactcaatagacagcctgacaatgtcacccttattctgagcgatattgtacctccgttacctccttttgactctgtatgatgccggtgttttgggatgcttggttgggtgaccccttgcctccatggtatacggactgaactgggcttttctgatcgtttgtgggagagctagaagcattgtggtggaagctggggtgaccttctcgaagcgaattcgaggagaacattgtagatattacttgcctagtgatggcttcagtttggtcttttgcaatatgtcttatttctttgctcgttcaaaatcttcataccctgttagaactacaaataggccgatagtagagaaagttatatatttgtgtctaataatatgtgttttttataatatcgtcttgcgaagcgccgctgcttgctaacgacgggggtagttgataaagctgcaacgcagatctagacagaaagcagggcgaaatgtgactgcgaaaataggagtcggaccgccaatagtgtacagaatagagagggaccattcatcgtgtagaatgaagattaacaggcccaatagcaccaccgcatatcccaacctttcgcagtccagaaagcagatgatgtttggcctatccaaatagatcagcaacaccaccaagatcgggaccatcattaatatcgacacggtggttctgctgctgagtctccatctcattggtcatgtacctctcctgcaatgctgaacgagccttacgacgttcctcgcgagaacccagcatcttcccttgctcggcaatactgatcccacgcaagggctcaagaagatccaagactaaaccacgctgcagccttggtgaggtagtgagatgaagtgctttttccgtattgatcactttcgctgcgctaattcctggcaaagtcaggaaaacagcacgaggggtctcgctgcagaagctatagagacaccaaattgatgcaattagctgagccaggtccttttgcatatcgacaaagtatgattcatgtacggatgaaatgcaagctgtgaggacatcagtacatatgaactcgcggatggtcgcgatggtttgggtgtcctgggtatcgttcgtgggtacaaagtcttgcagaattgaccgaatgacgcgggtgataatgctaccgctacgcgtatcgcgcatgcgaagagcatgcgtacagaagagcatgactggctcaaagatctggggggaggagaggacgaaatggcggatagaatcagagaggttcggtgtcggcaggggtgcgctaggatccgattcagtcccatctgggtctgagaagtcacgttccgtcagtatcgagtggtttatctctattcgtagctggcgggtcagggagtgtttaccacctctctgtggatcgaatagactggctaccatgatcacagcagagtaagtcaactggcgaaggacactttcggacttcatctccgtagtgagatctccgtccgaaattccattcctgcgttgttcaatgatttcccattctgtggtgactttacgatcaatattcgtgaacaaagccgatagcatgggaggcaagaattggctgcggaattgcacagggcagtcgtcaatcagacaacgcgagatgttgagaagaactgagaactggtgggaggatagatgcggtgagtcaacaaataatgcttcagataggggtcctgggagttcggcaaatccatagaagtgctctcgcatcctgctcatgctgaacagcatggagtagcatgcttcgcggacagctctgacttttcctcgaaccgatgatgcaaacccttcaagtgtagactttgatgttgtgattctggcgtagaactcgtcgcggctaccgatagaaataccagcctgccaaaatcgatctgtgaggatacgttcgactaccggttgcatgccttcgaccatattccaattggcaggattgtggaaggcatgggcgtgtcttagaattaaaagttagcttggtggcatgaatcagcattagcataaataattacctgacaagctgcagcagagtgggaagaatgagagggatcaattcgtgccacatatcgcaggcgatcacataggctggcgcagattttttgactcgatctgtggaaacggccaacatagtcttagtgccacgcaatggcaacagctagaatagaatgaatcagattggccctagcacggggaatgagatttgtacttcttacctggaactttctggtcatctcttcttggactaaccttccttcattatccagtgcaacctcggaccagtctgccactttctgtgcttgtttagattgcatgtatggaccgacattttccagtccaagcatattgcaaaacccgggaaaagtggagctactctggcgaaattggtcgtcttgccatgactctcggatgggttggaggaatgcttcaagtcggttttggcgcagataaggatccgcattgattgcgcgttgcctgtattgagtcagtatgaagcaattttagatagagtagacaacaggaaggggaagaggagttacataatgatgagcaagatagaagtcaattccatttgcaatttatcatcgacacggttagccagcgtgatttctttgatctttggctcgagaaggtcatagaaggtctgcagtgggcaaggttagagagtactggacgatcgggatgtggaacatgacgtacgtagaaatagtctgcataacgcatagccaaccgacgaagttcagagcttgccaatccatgaagctctttgacagcctcggaatacaatgggtattcagaatgatctggtaggcgtgacattagaatgtgttccagaaccttgagcgcaaatcctggatgattgtccaaagcccttgaagagatgtcgacagccaatttgatgactctttgtttaaggaccggatcctatatgaacagatgagttgagaaatcccttgggtttgggaaatatgacatacctcaaaagaccttagcatcagacttgaagcccagttttccaccgcatgttctaattccattcgtttagattcctgtcagaattagcaaccgatgattcattttgcgcttcatcctcttacatcacgttgtggtgcttttccgtgagccgaaacccacttgttgtagcctttgatgacagcctctaccactgcgaactgagcatccgctcgcataagaggaatcgaggatttggtgaaagtttccactgtaaaattaatgagtcgcaaagtccatagctcattagattgttgacactcactgctgaatggctcaacgccgctatacaagttgtcgagattggtgtccacccgggccagaatttcacgcaccgcttcttggggccgcttgaaggtgataatttcgatgatcgaggaacagtaacggcggtaattgccaacaaatgcatgtcgctcgggaactgtatcaatgtcctcgagtaagaactgcaccgtgggatcatcggattcagtcgggagacactcccaacgaagaagcctctgggtacaaatgttcaagaagtggggagtttgttcttgcacaaagtccatgttactgatttttgagtgctgtaacagtctggaccaaagatgcaagcaaggtatggagaccgtcaggctctggtgttgcatgatgttgaccatgaattgcaggaatggcggcaggttcaaacggtccatggtagaggccaagaacttggcatcttccaggcatcctgcaatatatgagaccatctcagagagctttttggagataagatatttgggatcatcaacgtcatccggtccgacgattgaccattcgtaaagcccctgaagaacaacaaggtattctgactcaaaaatcagacatactaactcgtgggagtcttcagttccgatgttggtccttccataaagtgcatgaagtgcttcgattgcagagagaaccacctgctcatcttgacaaggcaaagcccggaaaatgctgggaacaacctgggaggcaatgacagctttatagacggaccatgacaaggcagatctcaaggtggccagagcctttatggccgcatcacgggcctgtttggagctagagacattctggacgcaattgtcaagaaattcgcggattcgaacgagccagccctcctcaccacaacgtggaatggtggggttagttttatccccagtgatttgctctacgatgcctgcaggggtaaagatctcgataagcgaccgattgagctcacctccccgtagtgacgaggcaatatcttctcggaaaaagacatcctcggaaagagtctcaagaacagcgaggataagctctttatgaacgagagatgcaccccagaactgaaccatgttggcatccatatccatccaatccagcccccaggtcttcttagcagcctcggcccacaactgggagatcttatttcggaaataggcagggtcttcggggcggacgttctcggcgagttgcaagatcatcatgcgtaaggtcttggcttcttcgggattggtgaagttgtattggcgaagaacgtgatcgaggagagtcagaccgaagtatcggacaacgggctcatactccatacgagaagccaaaaggaagccatttcgcgctgcggaatcagacgctttaaggttctccacgaactgcgaagcctcctttcgtatgtcgtttgacgatgcagggttgtgaatgagttgcagggcacggattatgtcggccatgccgccttccgacaactcctccgcagccatcttgtcgacgcgttgtagaagaatttgatgaacaaaaaagttaagtctcaatcccgtcctaatgtagtaggccgcgtctcatagctcagagaagataggtaagactcgtccggtattagtttagcagtcggacaccgcaatggccatccacacgcgccactcgctctttccgggtgtagggtggttcgaggttgaggaccggactcgaagttatgaatcgatatatttgcaatgcacgtagttggcgaagtagggtcgcgaaatggatgactcgcagaagacaattggtgacttgtcggctgagaattttccctgaagatcaacaagggcacaccgctcacccgttgatgctccgctgagtccgctcttcctccagcactggatagatgactcaatggagatatttcaatgttaaagaggatcagctaggtaacgactcgtacgatattttttggtttccttgttaataatatatgctgatctgcgtgattttggtgtcatcatagctagagctatgcccctcatcattgtttatcttatctcccatacccggtcgttgtatactccgacagacctgtcacatatatatacacttttgagtgagcatcaagatcggtcggaggaccatttgatgcccttggatctgaagaggcagtagaaattaattcaatataatgaagcaattgatttcaaattggcaaataggaacttcaactctcgagatacaactagcaatttcacattatgacacactggcccttctggcattgttccagatagctgacatcttggcctccaggattagcaaactccccaggtttgcgcttaagtccctcaatcttgatatcctgttgtccttcggcatgccaccatcgcaggcgttgtagcttgacaccctggatgtcctggacgtcaatgtcccacttgccgccgctgactgcaaccacgatgttactccctgggaaatggaactcaggaagataaatttcggtcgggccagtcgcggcggttgctccttcagccgtcagcgatagagtaaaggcacaattcctgagatcgaaaacatgactatccaactttccgctcacgtatgttggactcgggcggatatatgcctctgcggcacgatagccttgctgtcgtaaggatgactgggagaggtcactggagatcgagggagttgacaaagcacctttgagatcacgaggtccaatatttggctctgttgagctactctgactttcggagtaggccggggaatgggtgtcaagtgggcaggtggtggatcctgctggcagttcgagatcgtcgcgagaatatatagacaggtcctcaccattccagtgatcaccccattcgtggtcgttctacgccgtgtcagtaccattcatgttctgaggggcaaatacacctacttgcgtgacataaacccacagagtaaagccattggaagtactgccctccagtgcaaagtgatttgcatccatagcgctggtttggctactatagtctccagtcttgtacgcatttttgtcgtccatgtcatatggaatcccaatctccgtaaataccaccggatgactgcccatataaattcggctttcatcgcggaggaacttgagctggtcacgcaaacagttgcgaatggccgtctcgccaactttgagcgcaaaggcaggggtgaggtacttgccccggagaacaccaataacatccacattgtagagtcggttcctacaggagtcagtactgccgacatccgattgaagtacctcgaccagagcttaccaatgttttgtcaaaagagttaatccatcatagaaatgaaccgcatggaccatattagggtcgtcatcagcagtgccgttaagatctggcggtacctccatcacaggtggctggcagaacattattgcgtccggccagattcctcgaatggcatttttgtatactcggtaatgatccaagaaatatgtgttggtaaatctgtcatagtcaagtggctcacccgtctgagggttctttgagaagtaatctttccgtagaagggtgtctgtggccggatcccaaactccatgctgagcccagatgcactctccaagtttccacccagggtctcgttgccagccatatttgctatcatcgtagtcagttggcaaccaggctatctcgcctgccgggtctacaaggtttgtgccagtcttgtagggaccgaaatttccaaatgcccatgttgtctgttcgcaagccttgcctgagccggtgagcattgcttggaatgcggtcggtgaagtcccaagttgaagttgctgctccggcggaattactgaaatgtcttgaaaaccaatgatgccacgatgaggctcattcatgctttcccagccaatgatcacttcgccatcaagatcacccgcttcatgaattcttcgtgctaagtatgcacatgcatcaataaagtggttctggagataatcttggatgttcatcccatcgatgattgccttaggagcgaaatcccgcccagcccaaaacaaggtaaacatggtttgacaaaccagtctagtataatttgtgctccagatcatcttggggaactcggccgggacatcgtatgtgttttgtaccaaggcggcttccgtgtctctgaagcttttagggtttagtcccgctgcatagagcgtccacatcggtgccccagatcctcccgagaacctagaccactaagaaggggttagcatgaagttgtaagctattaagctattacccgggtgatcatatatactcaccacatcctgatgcgggtccataaagacccagaaatcgtatttcttagctatccggagaacttctatggtgtatgcaacccactcatggtcgtaaactcccggtcccgcatgctcaatggcttcccaggtaaagatgtacctgatagtgttataaccccatttccgaagccgtttgaaatgaatatcggcatctttcagtgggaagggacgtccaacaaatgagacattgtccccgtcaaagaacttctcggcaatgtatgaggggatgtcgggtgtctttgggtacttcgcatcagccgcaaggtttatccctcttagcgtaacctcccgattgtgaggatctcgaaagctctgtccctcaactctcagatgtagaggggccattgttgctctggttctacctaaggtcgagttgaatgaggtcgtagtgtcacgcgggagttcaagggtgggcaagttgaagaaacgaagtatagaaagttcacagcaggtgggtctgaaaataggcaacgctttccgattcaactcgactagcaatattgaaatgcgaacgagcgaatcttggtaacctttcaccaaggtcacaagtgccaagcttgcccgatacctgcgtgcaagtcactagaacacgtgattctgaccacttcaagaaacctcgcagaatactttgactcctcaagttgtgttcagcacgtcttctgtgatatcttcaaagtgattccttcttttatctgtcaatccagacgtccaacccaacagtgagctcattgccaactcgaagatcacctgtgtccacctttgataacgataagaagtgacgtatcgcgagctagccgaccgctttgctccaccacgacagattctccccgctgtctctgcacaacgggaataatgtcgagcaaagcggcattgaaagccgtgcgagcagctttggaatcgaaagattaccaaactgctgctgaaaaggccaaggagcttatcaagagcgagccgaataattaccacgcgtatgacaatccctgatccttcatgaaacatgactaactcggtttgttatttttttctaggaatgtcttcctcggtctcgccagcgatcgattgaataagaataatgaagcggaggacgcttattccgctgcgaccagtatcaaccccgacgataaaacggcatggcagggcttgatctccctgtatgagaaacagggtggctgcaacgatgatggttatcacaaggcagtcattgctctcggaaagatattcgccgacaagtatgcattgattccttcttaattcctgtgtacgaaaaacatagtgctgatgacttctagcgacgagcaagaacgctgccaagatctaattaacaaatacacgaagtcgatgaagaacaaagggacctctcaacacaagcatgcattggaacttcagataccggggtcacccctgtacgattttcttgaggggcggttgccccgtccatcccaaacataccagcgattgatcgagattaccgagcgtcaagaaagagagtttatcaatcgtgagattggagagcgccgaacgcgtcttggtgctcgcatcgaacaagtcacccaggaagttcggagggaagcagcgaacaagagccgattggaccaattctaccaaggaatgattgattggaccaacgacgatacagtacgccgtcaatacgaggagaagttgtttcagcgtgcatatgaggaactcggagttctgcctgacgccgagaagggggcgaagagagcagccgtttttaaggcagcacatgacatggtaatcataaaacatccgttcgaacccgcatggaaagtttttctggggtggcaagatgttcaggatctctcccagtatgacgttggccatctgcgtgagtacattgagttctttccagaatctgggctctcccaggttctcaaaggattcttattgagcgaactatcgccatttcccaaggagccaacggacgaaacaaaaggcaaggatggcaaggatgggaaggaaatcacagccaatcaacccgataatgaaaacgatgacgatgcaactgttacccaagaccctctcgtacttatggtcgagggcttggattccgctcgcgattcaattcttgcccaccgcataatggcagatgtctacctctctttcgaagagtatgagagcgtggtcaatgttgctcgtaaggggctactgtacatcgagaacttgataaagtacagtggagtcaagatccccaacaccattgatgccttgaacaacgcacttgccaatgccatgatttattatcaatccccccggtatcacgcagatgcgaaaaaaatatttgaggacatccttgaacggaacccaacctcgtccaattgcctacttgggattggtctgattttgaaagaggatcaggactacgcagaagctgtcaacttcctgcggcgatcactagcacgtgattcttctaacctcaagattcgtggagagcttgcttggtgtgaggcattgcatggtgaccttgaaggtggcctagccagtcttcaggctacgcttgaggatctaaaagaagctcaaccggacaacagagagttcaaatctgagcttctttaccgcattggttactgccaatgggagcttgatccgtccccagctgcccgcaaagatcgcagtcgtgcttatgctagcctctttgcttccatccaggcgaatatgaacttcgctccagcatataccattcttggtttctactacgcagactacaagaaagataagatcagagctcgtagatgctttcacaaggcttttgaactgtcaacctctgagattgaagccgccgagcgtcttgctaggggctttgctgactcgaaggaatgggaccttgtcgaagcaattgcgcagcgagtggttgactccggcaaggctaggccttcccctgggtcaaaacgccgagggtttagctggccatatgcggcattgggttcggttcaggtcaacaaacagcaatacagcaaaagtattgtgtccttccaagcagcgcttcgactcaagccaacagattatcactcatgggtcggtcttgccgagtcctaccaccactctggtcgatacaatgccgccaccaaggcctttgagcaagcaaagctattggagccagagctttcagctaaagaccaggaatatgtatggtttgcaaggtatatgctggcaaacgtcaggcgagagcttggtcagtacgatgacgctatcgctgcctacgaagatgtcctgaaatctcggcctggtgacattggtgtgactctcgcgcttcttcagaccttgaccgagagttcgacgaagagccttggcctaggtctcttcaatgatgcagcggagctcgcataccaagctatttcggtggccacctccctggtgcagattaaaagcgacatttttaacttgtggaaggctgtaggcgatgccttctccaacttctcatacatgaaagctaaggctggaaagctatccgctcccagctgcaaggctttactggcagtcgatctggaccctatggcccttgatgtcatgaccgatgttgatggtgtcggaactgattggctcgcagccaatgaaagcgaagagtcgatgccagctgaattctacgttcacttatccataatcgcatttaaacgtgcgctgcatatttctgcgcatgatgctcattctcaagcagttgcctggtacaaccttggttgggctgaatatttggcctatcgcactgtgcagccggatccaaccaagaaaggtaagaagtctcgcaagttcctgaaagcagccatgcggtgcttcaagagagcaatcgaattggaggcgagcaattccgatttctggaacgcgttgggtgttgtcactgcaagcatgagtcccaaagtctcccaacatgcatttgtgcgaagtttgcatttgaatgaacgcaacgcgcaagtttggacaaaccttggagcactatacctcctgcacgaagaaggccaccaatcatacaagacgttcttgcgagcgcaggccaccgacccagactattcattggcttgggtcggccaaggcttcgtatcacttattgttcgcgagacacaggaggcgaggggttacttcgagcatgcctttgacatctcaaactcatccgatattctcactaaacgccagttcagtctgacccactttgatcatctgaatgcggcctcttcatctaacgtgtccgaactcattcagccattcttcgcactgcaccaactctgcatccaggatccgtcaaacctgccgtttgtgcacctttctgccctgttagcagagagaatgggcgagaccgcagatgccgagtctagcctggaggttgtctgtgcaggcatggaagacgagtttgaaaagacagagtccccggcttccctttcgaggtattcccaagcaaacgcagatatggctcgtgtcctccttgcacgccattcatatgaaaaggcagcagagaaggccgagctcgcgcttaccctctctggggaggaagacgcagagaaattcgatcccgaagcttgcaagaagcttcgtctgtctgcgcatctgacagctggtctagcatattacaacctgaagtctatggaccaagccatcgatatgttccgcgatgccctcgaagaggcagacaatgctccagatgttgtctgtcttcttgcccaggtcctgtgggccaagggtggtgaggaaaaccggtctgttgctcgggagcaactgcttgactgtgtgatgaaccaccctactcacatcggagcagtcacccttttgggtgccatcgctctcctcgatgcggaccgggacgccattgaagcagttgaatcagaccttaacagcatgatctcgcgtgatgacatcgatctccacgaccgagctaaaatcatcaaactcctgagtgccatctcagcaacgggactcaatgataatgcagccgttcccgaaagcatcaggcgcattggtgatgccactgctgccgtgatgcttacaccgggccaacctgcggggtggatggagttgtcggcagcatcgcgaaacccgtacgcagccgccatgactatcaaacgcgctctgcgcagcgtgcctccttacggtaatctcggggctgaggacctcagtcaagcctactcgcaaaccggcaaggtcggtgacgccttccgagcgatcatgattgctccgtggaaacgcaatggatgggaggaactgagccacaatgtgcctacccggaacatgtggacacgctgtacgggccataaatcagaggaatcggacgacgacaaacctctcctgccatggaagcgccgcacaggccatggacctgagtagtcggacgacgatttgactaccctgccactccacaacaacaagcgccgtacaggcgctagggctaaatgaacttgatgcacagtgtatttagttgaaatgtacatcagcttttagcgaatgaacatcacaacatcaaattcataagaaatatatccacaatagactaagagaaatgcaaagtccataccttaagattaattgcgaagtagaagaagcacactccgccatctgttcagccggttgagcccacgatgactcgtgtttcctcattccccttcggcgcctgcggtcttctccagcaacctagccttcctaccctccctccacggtttatccaaagcctcgatcttccccccgagcagagtaacagaccccggggaaagcaacaccatacctctcgcgacagacggattacgaagcaagagcttcgccccaatagcaagtttctccaatgctatgccatcgatacgctgcatttcaacagccaccgccatagttcccgccgcatcctgaataatcaggcggtgcggcccatacccactgttcccggatgcagtcgcagcaccgttcgaaggattgttattcgcacgattattctccgacgcctcgaggtcctcgcctacagcgattgtgcgcacgatctcacggccgcggatcgcttcgccccgctcaacgcgttcaattgcttcgatctggctccataggctcgtgccgatgtcttcgatgtctagcacttgcacggggattgagccttgcagccgtcgctcttggaccgccgggtcgtgaatatcgactgggagtacgcatgatctgtgcttggaaagtgattctctgatatcagaggcgaggagacggaatatagccgtctttgtgagggcggatgcggggatattgcgttgcgctgtgctggacgataataggaaggcactgagccagggttgggcgactgagagggatttggtgctcagtatctgagctgcaatttgatcaggactggtcatgatgtattggactccctcaggatcatattggcgcgtatggttattctaagggaactatcgaagtcggggaagctctcaacgtgaaaataaagcacagaccaccgcttaaagcaattgacctggcccgactctgttacccccgacaactccgacacacctcacgagacatcgcaatgtcgaccatatcttctccacgccaatccctcgcctcctctagagccctttccccgggtccagcctcctcccgcccatcactcgatgccttgaacaccagcgtcagcggggggctcagcgccgcatctaccccatccactgcacgagctatttccccctcactccatccccgacgcaatcgaagtgccttgcgagactattacaatctcaagccacctggggcgggcacatctgcctcccgggacgcatctcgcactcggagtgaagcaggagacatatccgacccagccagtctagcgtcagggacggagctcgacagtgcaaacttcgacccgcagcggtatgtcgagcacctattgtcatcgtcgtcgctgtctacggtgctcaaggcggagaatacgttggttggggatatccgcactctcgacggagagcggaaagcgctggtctacgataactactcgaagttgattcgcgctgtggagacaattgggaaaatgcggcgcagtatggatgatcgcggtgcgccgttgacaatgacgaaaacgctgggtccggctattgcttttgttgctgagactgccagtgggcttattaaagaaggcgaggagcaacggcggctgatgaaggaagccaagctggaagatgggacttcgagcaagaagagtgagaaggatactgttcggtgggtgctttcttcaccgcagagattagagaagcttatggcggagggtaaagaggaggatgcgcaaaaggactggaaagagatccagcatttactcgacgcttggggtgaggtcaagggggttgctgaggttcggacagcgtgtgggaaagtcatgaacccggcacgcaacgatgactgagcacctgcttatacatacctttcttcggccatgatccatgtgattgaagctcttgacaattgacttttgtcgaagtgagctctcacttttgactggaacagcggttgccaccatgaatgagctggctcattcatgaagatagatcgttcctgatctatacaagacatgatcagtcatttgtcccgacgaacattctacgaaatcaccgctgccccggcttttgggaatgccttggacacacaacctagacagagacaaatacagtacatgtttgaaagtttgtgcgctaatcctcgccgagtcacggctacgtttcctatcacctacgacgtcgtagctgagacgacgaaagcaaggagcccatgtgagcggaagagaaatgctggaagaaagatgaatttgcctctttggagaccacacgggcagttggcggctaagtcctggcggtaacgttcgcacaagcgtctaacgttaactcgccaccttcgagggcagacacccaaaccgccaactttgtttccgccctctaccatgcagagagcgcggtagtcacctgctgttgggcaaaggttacatctaaacagcgttccaaccaatcaaagcaaacttctcgagcctctgtgggcaaagtttcatcgagtccatatatgatgaagcttgcaatcgcattcagggactttgcagtcgtaaaatccttggtaactaaatagccaccctgtggcatgagcacaacctgccgggatgaataccgcatgtgatgatgtcgtcaccagaacaacgcctccttccagttgatgcgccaagctgaagtaactttgcacgctggccgtcaacggtcttcatagcattcaaattcttattcgtggcttgggtgtttggtcactgaccaaacattgtgcctttttgacctgttagcctagtgatgaaactcaagcaaccgcatccctgacactctcccaggcatgtatcatatagttcccgggagcgactgtaggcgatcctgggagtgtactcactccgaggagcttgaccttttactcctaggatcatgtcacgctgctcctgaaaattgcgcgctgctctgtgaggatctcacgtatgcgtagttgaatgatcaatattgaggaagctattgtctattctagatacaagattattttaaatacaagacatagcgcgaggaagcgaagaaaggatgcctcttcctccgcggtctcattggcaaagctttctcttgctcagtggcctagccttaccagcagcctttcggcgcgttcaactgcccttgcagagtcgcactggacgaacttcgtaatgttcctgccctttgcaaacgccattatgatagcagccattaagacgaagggccagtcttccacccttggctccccatgccggtttttgttcaccgcacaatgaacttcaatcattctctcaaacttgtccagccacatacacagccccggctgcgaaagaattctgaaaaatatctggactgccacaaaaccccgtactctatcgcatgatggagtctggcccaacttgttcttgtaattgaccatgattcgagggaccgaaaggagaagttggaagactggcaaatgtttgagaaaatcaattgattcaaaacaattagcttacgtccgaggttttcatctcaaacgatgtcataggtctgagaggacgtgagagcttcagccaaagctcattatccggatcatcatcatcaatatacaagtagccagtatccgcgctatcaccgtagactccactgtatgccctgtactcatcttgaatcttctgcgcagtctcagttgacagccacatatatctctccacaattcccgggtcgaccggcagaccgccatagataccaggggagtcccattcgcctctgggatgctgcccccaaggaacagccatatcagaaaacttgacagaggaatgggtcaaaaagtccctgggctccaaatcaggctccaaactcgttttcttggtggtgtcataagggtcgaactctgagatttttccgcttccaattgaacgctccctgacaaactcctccagatattgcaagtagtaagggtttctgctctgtttggcagcctcgaaataggactcacggggagggggattcaacgccatgaaaagcgattggtagtcacaaagtatggaggtgatcgcaatttgcggtctcatggaagggcacttgccagccagctcacgcaaagtgttctcatgaggccgcacaggccaccatataagccaagggaggcagtcagagtcatcgtcaaggtcagagatatcattgttcatgattctacgagcatttatcgcagtgcgaatctcgcgacgctcgcgctcattgccttcgctgagcaatttacctgggagaatgattcgtccagggttggtttccagctgataggcccaccatcgggcaaaacttgtatggtgataaatcccacgaagaatacaattgtattcaatttctgttctgagcctccgtgggtgcatgaatcgagcgtatctatccacattaccctcccatgcagccatttgcgttggaaggcgtttgtcaagaactggaagatcaggcgaaagaggcatccacaaatcctccgagtctcctgggccgagtatcgcatcgcgatctatttcaatttcttcctcgaacccaataaatccatcttcctcgatgtcaatatcatctgcagttgtatctggcaagttctctggaggaagaacacgctggctcaaagcccgtcggggcttcatattgccgtttagaaatgcgggtgcttgcgggctttcaagattaaccgatcgagtgaaatcatccataacagcccatctttgaggggccgacatgatgattttgtagatttcggcgtcttcggcagcattacaggcttcttcagcaatagagacgtctggcagaagatccaattctttgtaaagatccgtatacaaagcagcagcacacgcgcggccgacttggtagcgcatagatggataccgactagcgagctcgcgataggtttcttccgatgcaaactctggataccaaatgcagtatggctcggtggcaggttgcatatcggggatgacgttactcatgatcaggcgagcattgcgcgcgcgagaaaactgatgtgcatcgtcgccggaacatagctcaatgattgtcgggcttgttgcaaattgaagtgagtcacggatcccgcgaatgactgctctacgatgccaaaaagaggtcatattagacgggactttttcgccctttattgccgcgatgcattggtcaaggtcgtactcagcgggttgttgcttgcccgcgtggactgggaggtccgtggaggaaatgacagagctttgccctgcaacctgagtagctgccatgaggataaatagcgcaggggacgtcaggctgacgatttacggaaggggtctgcaagaacttgaggaggggaaaggcggagcgtacgcaggaacataggggccagggttactttcgtttcggatttaatgcatacaatggtgccttcatgtcttaatttggatacctgaattacaattacagaggcgtgtctgagaattaggcccataaagctatttctgccatacaaatccatatatcgcatgattcttagacgatttgaacctaaattcggaggtaatagcgatccaatgaattatggatatctcttcagagaaaataatacgtatagattcggggtgttaaaacttatgaacagtcactgtacggatactgatttgtaattttacagtacagcgtatgcagggcatgcagcattgggggccgcatgcccaggtggacactaatctgattacatggcgaataagacaaagaattacctaaatatttgctggtacaaccccaagcaaagacgatctaatccgaagaaagcgatgataatgcaggtacctggtggacagcagagcgaatgacggacgtgcgtggcagaacccgtgtttactaaatcctttcgctcacttcgttcgtttcagggcacaactaccatacatacactgggaactacgtttcagttgactctgatgcggtgctttgattctggctggggtctatttaatatgagagaaacatactagtagctgatgaacaatcgatgctggcaagtactggggctcgttactactggtaatacatcgagatgtatagggtaaaacttactagtagaataacaccacttgaattgacaactttgacattcttgtagggactttccggcaagggaagactttgtaaataacttcggagatatatctctgagaaaacagttgatgtccagatcagatcttccatgtcagaattctgttctatagagccccttcctatatggcgggcacggcacatttgtcccaaaaactttcccagggctttatttcttcccagtgcagaacattattgtcagtgtttgccggaccgccggtaatggcgttgcggttcccaagttcctcgccctatgtaccagcattagcgccctgcgagatggtctttgagagaaagcaacttacccaagtcataaacttgtcccagttggtaaggcccttgcctttgatcttttcagtgttggcggcaaatgttcttgggaagtcaactgcttggtatcgtggcatgcctggaacatcggtatctgcttcggccatcacaacggtgctgcgatattcgccttttttgttgggatcagcttcttggaggttccaaccctggtcgctagatagctctctgaccagccaattgtttgtctggcccttcctaagagccacaattcggcgggaaatatcctcggcgcggccaagacgatcagaaacatccccaatcgtgatcagatgcctatcatccttgacagccgcgaccttctgactgacagttctaataaatcggatgtgcttatctgcgtctgactctgagtcacctttcgaccccgagcctccccctccacttcctccaccccggcctgagatgaaagtgctggccttttcttccaactcagccaacttgggactgattgtcgatagtgaaaccgttcctttgaagttgtagactctattatctgccaattccttttgcgccctttggaggtccccttgagatgatggctcagttatggcaggaggaggctccagattagaaggtttactgagcgttctgagcatgaattccacataattcagaggcttgtccgtctctctgccgtttgagtccagatgtcggttacttgttcctgcgggtcctcttctgtctcggaaaggaaatatgagcttttgtctttcggcggtctgaatttggctgtatgaaagtgttgcaaagttagccatgacaacctgtaggtcactcgaaatattactaggacggcgaaaataacgtacacaaaaatctgataggcttcccacatgaacattttttcataaatatgcgcctgaagattgaagtcggtgcctttataattgttaagttcgccggggctgactcttcgatggtgggtgtgtgaatgatgattgggatgagaatgggccgaacagcttaagcccgtaagagaagcaagccatattataacgagtcccagaaaagagacctgggatgcccggaagagcatattgacagttcccaccaaagatagtcaagtggttcttgaggtaaaagtaataaggaaggactggaggatgacttgaaaaacgggggcagaaaagaacactaattcgttttatgcgatgtcctattgccccctctcccaaatgaaaagctccaggataataggttctatttttacggctcgattttgttcgaatttcggctttttggcgattcatactagcaaccagtgacggtcgcgcattgggcaagttaattttacttcgaacccctgaataggacccagactggagagaaaaaagaacaaaaacccgaaaaaagcctgaaagaaacctgaaatcaaccggaaagagggaagaggcgtgctccacgaggtagtcttacatcgtacaggtagagtgagtgggacgctgctatgaccaatagtgctcatttatggctcattatgagaattcctttctcaggtagtcccatcagtctgccagcctttgccagaagtccaattcaagcgtagaacgcctgaccgctgtattccgtacgttcaaatatgcgaaggtggagatgggattagtagcgggacttccgacaaaaactatttcaaaacttattcttggtcttatcttctataatttccgagcgccgcatcttacagggaaacaccgaatatcaagtgataagtgctgataacgtacttcaagtgtattcaccaatttaccccaagagagtctcattgctgctactctcagtcaatttcgccaaatcatccttcatgggaagaactattccatggctgagactcgatatggagtccaggcccacacgggaagtctctgtagatcaatcggacgctagtgttcacgcgatctgctgtggatgtaacctgggggcggaaaaaaagcaacttggggggctacagcccccggggccaaggctggcatatacatattagtgtactgacgccgcgaatcatttggacaggcctcatggattgcctccactctccatatagatcctgcggaatacctgcggactgtctcaggtacccggcagaggcttaatttcaagttttattcgcgcacgctatcgcttggaattagtctggcaatcgaaaccagccctgcagccccaagaccctgtatttgaggctgggactgtcgtttccctgaactaaagaccctaatggggtagccataaaagcgtatgaaacatccgaatgtctccacttgtactagtagtggtcttggcattagactctgcgtacggagtacatactagcatataccaatgtactagtctgggtatgaaatttcactctttctcatcgagaaggttggatccgttgaggtaaatctcctttcaaggatcagctggaaagttctggattggggcgcacgttccggctttattccaaagtgcatcgcggtacggtcctcagatgctgtacgggctgatgagcggtcatttgattgtcattagcttcataatggttgacccaccggaatccttgaattcccacagcgtatcgttccaaatttgtcatttgtcgtcaggtttgctcttttccaaggttgatataaatgttccaagcctactgggaacccgggcagtgatcagcaccacagcactttcaagttcttttcaagtttacgttcattccaggttatcgcctggggtagtatttgccttcattctttcacgatgaatactgcccttggggatttcatcccttttctttccttgagttttctctctcttttttctgttacaaatgccttcacccacacttcagcaagcttgaatgtcttgcctgcaccgggttgcccagagtcctgctcggttgtcggctcaaacccgagcaattggacctggattgttcaccaaagtgatttgagcatctgtgaccagccaatcctatttgatttccattttggagacgactcgacttctgattttgttgtacgctcctgtgctgtcctcgagcctttccacgagcagattccaagctcgaatatcaaagaagcgaaatggaccaatatcaacgtcactgattcggacgctgtaacacagtcgttggtagtatcgaattcttgtggagcatctcagcaaacttcagatgtgaccgttcaagtgggccctgctggtgctatcaaggataccaatgacgccaatgctgctgttaagaatctagcatcctacatgacaaatgtagcctcctgtggcttcactgttgttctgtcaaaggttggagaaaccgtcgctgcgctttatgctggagcggatgtctatccaagcagcgttggcccataccttgacagctttaccaaaaaccttgagggcggatctcagacaatccaatcatgcgactcaaactcaaagcaagacacgactattggaatctatatcgtggattcattggatgagctcgaggatatccaacgcgtcttcaagacgtggtctaaaggcgattgtcttagcgcaaacggtgaagagtcgataaaaacaaaaatcatcacgttggcatcctctggagtcagcaagcggtccgacatcttctcatcgatcgaggatctcatcgccccccggggtaactgtagaactatacaagtcaaactgggagatggctgtggctcattggcaagccgctgtggtatatcaggagctgatttcaccaaatacaaccccggtgctaagttttgctcgaatttgaaggctcaacagcatgtttgctgctccgcgggcactcttcctgattacacccctaagcctcaggcggatggcacgtgtttcacttacaccatccagcccaatgacaattgtgctgatattgcagccgggttttctattacccaggatgagatcaataccttcaataagaacacttgggcatgggctggctgtggtgcgaacgatctaaagcaagaccaaatcatatgtttgagcaaaggtaacacgcctatgccagctccgctcagtaatgcggtatgtggtcctcagaagcctggtaccaaggctccacctggggactataatggctggaacctcactgagcttaacccctgccctttgaatgcatgctgctcagggtggggcttctgcggtactacagaggagttctgtaccaaatcacccgccaagacaaatgctccaggagcctttttgagtggtaaaaacggatgtatttccaactgcggcacaaagatcgtcaacaacgagcatgctccagacaagttccttcatgttgcttattatgaagtcttcaacctcaaacgcgagtgtttgaatatggatgtcactgagatcaacgatgcatccttgactcatgtgcacttcgcttttgctggactgactgccgactttgacattgcctttgacaatgacgattataaagcgcagtttgaaaaatttgtcaaaattagcacatcctacaaaaaggtcctctcatttggaggatgggctgagtcgactgacgccgcgaccttccagcgataccgtgatgtcgtcaagcctggaaatcgtgacaagtttgcgacgaacatgctcgcattcttcaacaagtatgaaggtttagacggtatcgactttgactgggaatatcctggagctaccgatatccctggtgtccctccaggcaccggtgatgagacgaacaattaccttgctttcttgaagctgatgaagaacaagattggtgataagtccctttcaatcgctttacctgctccctactggtatctgaaagcattcccaattgacaaaatggccgagtatttgtcgtactttatctatatgacttacgaccttcatggacagtggggtgagtttaccacctatcttcccgatcgatgaactttactgatcatatatagattatggcaatgccaacgcaaatgtgggctgtcccggcggagattgtcttcggtcgcatgtcaataagaccgagaccgagaacgctcttgtgatggtcacgaaggccggtgtacccgcaaacaaagtccttgttggaatttcaagctacggccgcagctttggtatgatcgacccaagttgcactggccccatgtgcaaatacggcggttcctttgatgtttctacggccgaggctggacagtgtaccaacacctctggatacatctcaaatgctgagttaaatgatatcatgtcgaatgtgaacgcaagccaggaaggctacaagggccgcgtgtggtatgatacggaatccgcttcagatatgatggtttacggtaccaatggaaaaatcactacgtgggtggcttatatggccgatgacaccaagaacgaacgcattgactgggtcaaagggctcaactttggcggagtcactgactgggctgtcgatctccaacaatggaacctgggcgtggacaccgactctgaagaggccaaggaccttcaactagccgatcttcctaaggggtgtccttccgacaattggccggacagtctcgataagctccaggctagcatcgattctatcgatgtagaatgtcggtctcaggctgttgtttgggttttgcttaaaacaatccccacagttctgcaaaattacaaagatgcatctgaaagctatgatgaatatgttagttcaaggcctttttgatactggtgcaatcaagctaatctgcttctagttcggttattattccgaatgggtcaaggacaacatcaacgattcccttgagaagtttatgtggggtgatggaatgaaatacatggactgtaaatggacagcggacaaagcagatggtggcagtggcaatgatgcttgtacaaagatggttgttaaacagggacaaccaagtcaaggcgttgtcactatcacatatacggtacgcgatgaagatgggttttacaacgcgcttcagaacgattacggtatcctcaaagactggattgtgtgggaggagacgtcgggagatccggaagacgctccttgtccctgtccagtaccaggccactgcattcaatgcaacaagccccacggcgaagtgtaccacaactggccacaaaaggctgccgatgatgctatcaaggttcctaaccttaagtctgtgatcgacactgcagtccccaacatcaccgcacttcaaactgtcatgctcggaagtttcacggagatacgtttgggggccatggatgccaccgacgcagacatggccaccgcgtacagcatgcccgttttcatgcttgcagacacgaccgagcaaatgaagaatattaccaaaatcggcaaggagcagaaaaaggccgatgatgaagcgaaagtcagcttcatcttggacattgtcagcattgttctcatgattattccattcgctggagaagcagtcgaggcaattggtggcgtggcaaacgttgcccgcgctgctttggtcatgggcgaggctggtaacgcggctctttccgtctacgatattgtcaaggatccatcctcagctccttttgctatacttggtctacttatgggagccgatgcctcgatcgtaggcaagtctgccaagactaccttctccaaagccgccgctttccggcatgctatgagtgacggtaccttgaagtctttcagcaaagagttccaggcaaatgacaagatcgtgcaagacattgtcaaggcttgcaaagcctaaatttcatagtttttgctctctatggatgccctacagggtaggcctgaaaggcagctgctactcacaacaaaagcctaccaataaactttaaatcacatgcttataggaaatgcaacaattattgatgcattctgacgtgctcactgtttccctatgcagtttgtagccctttatctgtggcatttattcccttttctttctcttctctggcagacagcttgccgaccaacgtgcagcttgccgttcagcttgctgcgttggcattttctttatatgtctgcagatatgcttcttctgttttctggtggatggaatctggctggctttgtggtgcgaagctatatagacaagcttcagtacagtagttagtttcccatcttccatcaattcatcattaatcgtcaatcaattcttcaatcataaacaaactcataatccctatttcccttcaagcagctcccgactcgaatacatactcgccttcagtccatactcattcttagaggtaatatccagatgagtgaacgcatcagacttgtagtaaatcgacctcggccctttcccaacaagcccaagatcatccaaattactcacaacccgcttaacatcctcgacatcgccgaaatcagccgtatagacacaaatcaaacgactcgctccagacccaccattcgtagcaactttcacagcatccccgagctcccccttctccatcgccctaacaacgacgccccagaactcatcgacttgacccacagtcggaaaaagcatccacttcccatttgtaacacccgtctccctcgccagatccagaatatccttctcaagttccttccgcagcggattcaatttacgcgtcaacgcagccgtagtcttcgccccagacctatcatgcgcctcgcgcagtatcgcactcccattttcgtactcctggagaagctccctgcctctcctaagcagagcgggaacgtccccgctcgtcttcgacggcagatgcgggttgtacatccaaatccaggggcctacgaccgtggtttccgtcgtcgatggcggaagacgcgataaaaagtgatctaccggctcggtcttcccgcgtttgttgcgcggcatgctgtctgtttctggtggtgcatcgctcatacaaacgtctggtgatgtcgcctttgcgcgagtcgacgacgcgcggagatgctgctgcatggtggatagcagctttgggtgagttcctacccagaatggctctgggtcgtaggatgagacttgtgcttctagtttggtcttttcgtcgtcgtcgcctgatatggattagctgggtttcggggatgggttgaatatggaatgggtttaccgtagaagcttgattcgtcggagaatatttcatcggttgctgtggttgatggcattacctaggcgtcgctggatgatattatgatgctctggtggttcttgttgagaagtagttggagatggggggagtagttgagaagtagaggtgggcccgcatttgaatttcccctctcgcgactttacgagttcacctgttaatgtctcatagtaactaatactttgatttgaagtaataggaagactaatttaataagtatatgaatatgacactctttatgcattagctatccacagtctttgaatatatttatagcagcatatattctactatcctacttagtcccaacttattcggctctgttaatatcaattcatcaagcctttctagtgccgtgaaatgaccaccctataatattatgtctaatagtacactaggcgggtagtaggaaatctccaattggggtctttagtcgagagccttttactatttacacgccttatgctgtatttgaatcgcaaagcaatcgattattttagcaaatgattcttaagtaaagtagagtagaattttcaatcccccctctcccttttaaaagtccgctgccaccaggatacctggggggcgggcttcaatttcaatgggcaaaagaagcaatttgccaaatatatagtgtaagccgaatattcttttagataggtgccttcgttcacaacatccacattcccgactacaacattcacctcgatccgaacaatcctggaccatttcttcgcgcataaaccagtctgaattacgcctgaagctatagtagaggtctttggagtccaagtgaaacctatactctgcttggtaaagggcgtgctcctttatagtttattgtgcttggatctcttcaagctgcttatttgcgttctcaaattcagttgtatcagagttagacttcccatttgattcgatagccatagcctttggtagagctataaccttatgttgtagccattcctcacgctgtattacttcacatagagcgcgctcggtagttaagaaataactcagtgagtttagaccgaacgacgtagtttgacccgtatcttagatattcatctttttggtaaaagtcaaaggttgtaccaccgaagaatcccataatcgtatttagaaaagctgtaaggttagtatggtggttacacgaatgcagaccgcattgaaacaaaacaagacctcggccaatcaaccgatgaaccgaaaggacaagcatatagagataccatattaatttacacaaactggttaaacatcacaaaagacgccacaaaagacaccacaaaggacgtacataatagtcgtatcgccccggtggcatattcagtcgcccgtagacgttgtacaatcggcgattcgtggttggtgaagataccgggatccaccttaccccgcgaggtataaatcggcagtttctctctctcttgggagcacacaacaatgaccgagccaaagactgagagctcgcagctcgccgattgtagtcatattccgatcatcgacctctcaactttggatagtccaaatttcgatgagcgacggaagcttgctcaatcgatctatgatgcttgcactcaggttggcttcttttacatcaaggtgtggctcttagggcgctcttgaacctgatcagctattaattttgcccgctcagaaccacgcaataccggaggacaagattaatggcatacacggttccgcgaagcggctcttcgatctccccgaggagcaaaagatgaagttttatattggaaactcccccgtacgcctggaaatctgaagttcaaaaatacatcctaagattatactagaaattccgcggctacagtcccctaggtggtgagaaatccacagggacagacgatgatcccattgccgaagaagatgctgtcagcgctctctctgaagcctttgacattggatacgaaactgcaatggatcctcaaaaatcgacagatgaccctcttccccgtgatccctacggactgtatggagataatcaatggcccagccaagatatacttccaaacttcacagagacctatattgaatattgttccatgatgctcgggctctgccgaaagttgatgagaatatttgccctcgcattgggcttgcccgaagaacactttgatgcgatgactaagaacccaggtgtcacgtctaggatgatgcattacccgcctcagccagtgaaggaagaggttcgtgaaggactcggggctcatacggtaggcaattgaccaaaaggcaacaaagataccgaatgatttacttatccgctgtcaggactttgaatgcttcaccattctctcacagggtagtgtcccgggcctgcaagtcttgagccacagtggtgagtggatactggctccgccattgccaggaatgttggtcgtcaacattgcagattgcctgtcaatttggtaagactagctcggtcattcaggagaatgcgtgctgacttatttaggacgaataaaaagttcaagtcgactattcatcgggtgacaaacttgactggacaagaacgttattcgattcccttcttctttggagtcgactatgatacaacagtgtcagttctaccgaatcatatttcggatgatcggcctgcatgtaaagagcccttcaaagcaggcgaggtgagtcatagaatgggttgagtaccgatgtgataactaacgagggaatagtgggttcgcgaaaagctatcaaaggcgtatgttggctatgaaggctaggatactgaatcttattgagacataatttccatcttgcttgccctgctaaacttcagtcatcctgcactggaatatgttgttcaaaggctgatcacttcttcccaaataattaatcccaaccttcaatcttctctaaatccaaccctaggaatccaactagccccggtgaacaagaggagtttgtaagcatagtcgcggaaccctgcacatgacatgacgcagttgcctgatcgagctatgtgacaccagtgggtccacttatatatagattaggtagtctcctcccgcttccctcttctcttctcctcctctccttgtcgtccatatttagctggatggataaaagctacttacttcgcaatgtctttactattcagttctccaccctctaaggcgacggcctcccttacaccgttcaaggccgccatccctaaggccaaactcgtcgagctcgagacgttgataaagatagcgaaagtagcaccacccacctacgagaattcccaaacagaccaccgttatggtgtcaatagggattggctagtgaacatgcaggatcagtggcttcggtcttacgactggtaatgatactacagcccaccatatgtacatcccaatacatgttgagactgaattattatactaggaaatcctccgaggatcgaatcaacagtttccctcagtacactatggaggttgaagatcttacaattcattttgtaggattgttttcggaaaagaaggatgctgttcctatcattttgttgcatggatggcctggtgggtctatcttggtcttaacctcacaacaggaaaatgagcaaaacagagactgacatatcattaaagggagcttcctcgagtttttgcctatactgcagaggttccgagaggaatacacgccagaaaccttgccctatcacttgattgtaccttctttgcccggttacgcattttcctctgggcccccattggatagggactttggaacaggtgacatcgctcgtgtttttgaccgactgatgaaaaacctcggctttgagagcggatacgttgcccaaggaggtgatattggaagtcaaattgccaggcgtttgggcacggagcatgaaagctgcaaaggtacggaaaagtcatggtattccttttgcggtgattgagccttctctgacaagttgtgttatagctgtacacggtaagtgcttttttcatcaaagttatttaaagactagaatacgaatatcagctagtcaacgcggttttcatgaaaaagccggacggcatgacagacgaccacctgaacgcctttgaattacagggcatcgagaatatgaagaaattcataactacgggcgtaggctatgcgattgagcacggcactcgacccagcaccatcggacaagttctggcatcgagccctcttgctctactagcgtggtgagtcgtgcaaagcgaagcgtagtcagcagaaatcgcaaacctgacacctgcaggattggagaaaagttcctggattgggtcgacgatccgcttgccctagaagacattttggaatctgtcaccttgtactggcttacggagacgttcccgcgggcgatctatacttacagacaggtgaatttccctattattttcgacttccatcagcagatatctgatgtgggtaaatagagctttcctgcgccaccggttatgatcgccaatgaccctcgttggtatatccacaagccatttggattttcttctttccctggggagcatgttcgactgccgcgctcgtggattgaaaccactggagacttggtattctgggagcagcaccagaaggtatacgatgtggcatttgaagagccgagatttgatactgacgctgtttcattatagggtggtcatttcgcggcactggagaggcctgatgaattgaaggcggacctagtcaagtttgtagatcaggtgtggccaggtattaagagagccgactaagttgagactaataagtagggcagtagagcatttgccaattgagttaaaattgtctggagtggaaagtattcaggaactgtgagtagctgatgcaatattaaccaatgagagtatatttagtcgcccgtcaacgtcgattccaatagtaacattaatttaaactacgttcgcactttgttattgatatttttgcatttcattttctatctcatatgtactccgaggcaaatcaaccttactaaagtactcgtatcacaataaacgattcttgggactagttcgaacgcatattatcaactagccaatgtttaaaccgaagcttcgggggcttcaggtgaggctaaggtatccaaccaaagccaggaaatgacggcctggatgaggcaggtaatagctgcaccgggtgagtaaattgaacgatacgttatggaaagcatgactcacctagtgccacagtcatgtaaaagaagccaactccttcgaatagcgagccagtcaatagaggcccgagcatcattccgagactatatcctacttcagtcatggaaaagactcgcaagttgcttctgttggcctcgaatagctgcgcatctttagtttccatgtccttgacaacatctattgaaagtcacatttgttagtggaggaacgaactacacaaaatgtgatcactcacaagccagttgcacggctcctacgccgcgcacaagaggtaggatactacccaaggcaatcaaactggtggtaaaaatagactttccagctgcatctcctccggcccatgggaagtgggagtctccgggcatccctagaagtaagatgagagggatcatcgcaagccagccgaagacagtaggtccccgtattccgactcgatcgcgaagccatccggatggaccgctgagaaggatattcgggacttggagacagaagaacatcatactaatgagtaaactcttccaaccgaatgcctgtcgcaggtggacagggagagtgttgttaatgccagacatgagggaggagacaacgacgacgttggccaatccggtcaaaacacgtggatcggagagcatgattctgtagtactcatgtttgaggtcatgcttgttctccactttacagtcatctggattgacggtagacggtgcctcagaaagcagtgcagtcgtctcttctgggtccacctcattgctgaccactgacacaacaggcttgctcaaagaatcaattttctttgacgattcgaggccaggctcaatcattaccaggcgtgcaatgatatccaagacgagtacgatcaagggaagtgaccaggcggcccagtagccaaataactggagcaatgcgccactcactgttggtccgccgaccattcctgccgttacaaatgacatggccatgcccatcgactgtccaaggtgttgcttgtccacattatttgccaatagagcaaatccaaccacccaagttccggcacctgccatggattgcaggatgcgaccaaggaagagaatccaaactgttcacgaaatcaatttcaaataatcatcatcaagtttaaatattctcataccggatggggcaagagcaatcataagggtccctataaaacatcctgccagggcgatcaatagtggtttcttttggctcggagtcttctcggcaaaatgcgcgacaatcggggcagaaacgagaccaatgaacccatgagtggtgagcaatgccgtagtgaacgtctgagtctgtgatggatccagatgcagtcgttcttcaagcatataactcaagatcggagtaagaaacccgtagagaaatgtctctgatggatggttagcatgactcagagtgagaaccgtgaaacaaccacacacctgcgaataaggcaaccgtgatggacgaaaccaccaaaaggcgagatgaacgccacctgtagccccatggctttgtatccttgtccattttaatatattgagagtttgacaagagaagaatgaaaaagtggggggcagagaagaaattagttaagtagttttcaggcgctatgatcacaaatagaatcccattatatcaagctagctcatggagataacactattttcgatttcgtttacgagccctgcatgtttagttcgtctttctagtgccggcaatggctttctattggtaatgcagttcagatcgtgctcgcgtctaagccgaacaccctgatcgatacctcaatgcgcctctaatgcacctcaaatgcagctacaaggaaggcaacacggaaatcacaacgagtgtgtcacacttagagttcacgccctttttgcagatccgtcttatgtactatgtactatgtacaagcatacacatcctgcaatggtatcccgaacagaacttcaagagctcacggaacatttacatttcaatcgcgattgatccacttaccccataagtgtcgagctattacgcaaatctgccaatgtatctagacgcacatagcccgtcggcaaccgtcggacctgccgcggtcttatgtaccaagtatgactaggcagatcaaagtagtatcggcaccgtagcttgcgtgttcggtcctctgatctgaaactggtaaacggctgaatcctcacggggtagaaaaacggggtctacatgcaatgcggtgaaacaatgatagttcgagggataagccgcggcgtgaggcatgcatgagacagatcttactgcaagtccaactttgagggtgtatatcatcttaaattctgatagtaatgtattgttctattcaatatatattttctctttggaatttacttggtaactccaaatgcaaccaatccggcataccatcctagtaggaactatatatagcgactataatgtagtatcggttctaggcaatcgctacaaacagtgagtcttattggtgggatactccgaaatggctaagaccactcatataaaacgccaagtatacttagtacacatccagactatcctctgtagacgcgatatcctcgacttcaaggtggatatctcaccgccccactatgtgatttttgactccaaatcctatcaacgcaacagattgagagcaacgagattgtcaaaggatctcatttcgttcatcgtgtgcatcgtcggagtggaaatagtgtgtcacgcgacttgaacttttgatatacgtaccctgtcgcggtgacattgtcggacatattcaagacgccacattccgccccctccggagtcgacagctaaactccgagacttgcaagggctaaaatcattctaaattcggactagagcaaaatgggaagcattcaacatccccagtcggcgactacagtctttctagaccagccacccagttgcctggagttctgtcccgaggccccagactatttcatcgtgggcacctatcttttatcagaaaacaaaactgaagatggaggaatcgagcagtccaaaactgggagtctacaactatggaaattagaccctgttagcaagacattgtaagctaaccgcaatcaatcatattacctagtataacgccctcataacaaacccactaacagcacttagatcccaaatccaaagaattgccctcccatacgcagtctttgacctgcatttccacccaagacacaagaacctattcgcaattgcaagcagcgtgggatcagtggctctattccaagtatccaactccaccaccggagacgcatccgcaactccaactccaagcatcaccgagatatggacgaaacaagtacacgaagacccctcaatcccagccctatttctcgcctgggcaccgcaaaacttgttcccgcagctcgcagccgatggcttcgccgtcacattctcagatagccggacagccgtcttcgggacagaggaggacatccgccaagaacagagtgtagccgaatggggcacatacgaagccaaacagatgatcgaagtctggtttgtcgcattgtccacaagcaccggaagcccaactgcgaagtccccgatcccgttcatgttcacggggaatgacttcggctcgctacacacgcgccgtttcgataataccgccgagttggatgatccggacgagcatgtctcgcccatgctgctcgagcatgatgatcgcgcccgccaccacactgctggtgtcactgctatcttgcctcttgatgttcccctggttgatgatgcgccggttcttctgacggggtgttatgatgagagtcttcgtgtgtaccatgctacgcggaggggagaggttctcgctgagcaggagcttgagggtggggtttggcgactgcagttgttggatacgacgaggattccggccgaggatgatgcgtcgaaggtatccgagtaccgctttctagtgctggcgagctgtatgcatgccgggacgaggcttgtacgggttacgtgcaagtacgaagatgggactccgaattgggagattgaagttctggcgaagtttactgaacatgagagtatgaattatgctagtggtgtgtgggagggtggacaagatactactgagatattgtgcgtctcgagcagtttctatgatcgcaggctctgtgtctggactgttgatctatagtcaaataaaaagccatgccaaattgggaaggccatctagacgctgagactataccgtcagcaggtcccggtttgtcgactattgtaatgctactggagattcgtaagccgaaattattctaacatgattgtagtcatgaacacgctagagaatgcacgatgcataagcgacaggtatacaagtacagccgcgcccgaagacaataaaagagtcattcatatccgaaaaaagtatatcgttcccattgagcgtgtaattagacaatagtctccagctcgcgagcataacccaaagcattctcaataacggtgccgctagccaccagaatatcccgctcagacctagcagtcgcctcgggctcaacagggaagtatatccgaccgtcgcggaggatccagccgcgctgcttggcaaattcgatcactgcaccctcagactcgaggaagaggaggttcttggcgttggaaatggggagggaggggtatgccttctctgagcaacctgcgatttcattgcggatagtaccgatgagaacctataaagcttatgatcagtatgcttgccgacagagacattgagctcgagctgagcacgcatgcaacttacatttgaaaacagaccaaagtcttccgacggaacacgttcggacttcgtctccctccacaccttgtcatagcttccctccatcaagttgcgctccagctcaactgggtacttgatgcacgcatcatcctcaacactgccacccttcaagcacgcctcttctaccaatccctctagcactgtgtggaagttggcactgtcacccatgctcaaaagaagaagcagatacagccccgtaatcttgctgcgctggctagtgctgaagtcgagtttcgaagagccctgcccgggcagaccggcatgtctctcaagatcgtagaatggctgcagttgctggtagtaccgtgtaaatagctgcgcgtcagtctggcggatggaggcgagtgctccgagttcgaggacttggcgggcaaggacgacaagctggggaggtgtggaggaagtcggaatcaaagcattttgcataagaagagctcgcttggaacggctgagaaggtcgttggcgacgtcgaactgtttgcgctcgatagcaccgtggagctctgacacaagggactgtagatcggacatgatggagattgtgtgggttcagggcaatactgaaaggaaataaggcagcctagccggtgtatggcaaaggcagtaattaaagcagcggaaacgatagagagtttggattttgattgatgattgttggcgacattccgatgctcatgacggagctgtggtaggcggtcagcgtgcagtcacgtgtgggcattttgatagtcgctgatgatgacttccactactaccaccacaagtcaggctatataatatttgttattggattgaaccaaaagatggcccagtatcttgacagctatatatactattcaaattgatgtctacgcatggtcatccggcaatgcgtgtcccggatggcatacggatgttttagcctagctagaacaggtatggcgcaattcaagcttaggtatccaggaaaatagcaaaaggtaaaggtagatgcatatcaactcgatataattctgagaaagtaattcgtcactcatcgcaggcccagtgagcccggcaaatcgagtgacacaacgaacgtcatagaatgcagtgacaaaccttctgatatatatatcaacagcccatcgagagactgcctgtatatgtactaattatgtactaatatctaaagcatacatcaaatttatactcagtacaaggtgatatgcttctgtttgactccctgggaattagagaccggaaattatcaggatccagctataagctgtcaatctaacctcatgaacagtctcatacttgtccgacggaacaaaaccttacgttgcaatggtttcaggctagtgctcccactgggtatgatcagccctcagggctcagagcttctcactctttgtcaatctagtaatagaaaacaatcaaaacaaaccatcccatatggcatcctcgattttaggaacttgctacctctagtcgttctccaacatccttgaagggtaacatatatatgtggtacagtacagaatgacgaagtataaagtcaagttgatggcctgaaatctactcggatcatctgatttccgacctccgtgcgatgcgggatgatcgacgtcacagtgaagcgcagtgagtatcgcgtcaatctgacttcaaaataagaaaatttatattggatactgtgggattgactttaatacagctcgacttctcggatatccgaacttattctggattttgcgcccaaggtgattcatataaatatttgaatgtggggaaatacagagtgccaatcatctatcgcaaatcagctcgccagaattcatttagcttcaatatcgtgcggggtggtatgatcagctcagatcaaatcgacgtcattgctacattcccacgtatctcacagagcctcgaccttccccagtctttcatctccgctttcaatactgaaccaacattttgcaaacgccatggctgaagcagaaacacaaccacgtcgactgtcggcggataaccaatcagtttcgaaagccgatgtttctatgaaggaacgcttcttccgctacttccagcatgagatcaccggtatgttcccgttggtattcagacgctacatcattatcaagccacacaatttcaaaagacccttgctaatgacattcttctagatttgcagcaggagatggatcggcttgcagatacgtctctcgtgggtggtgaacgtgccgatgcaacagaccactgccttgccgggatcgtacggttatccaatgaggtcaaggatgcagcgagctatatccccacttatgatcagagggtgtacgcagaggtaaacgcgactcacaatatacccaatagagcagagctgacataattacaggcaatcaaggctttgcaggatcgattgagcgaaatacgtgcaacattcgagccccgatccaagtttagcttcaagaacaagaaaaacacctctgctgtatctttgtctgatgctgccgtgctggcagttgaaggacggcttagcatccctgggtaccactctccaggtgcctcgtctattgactcatccgccaaccacacacccaactatccttccaccccactgaacgagccagacaagcagcaacaagagcgaccggagcttgcgcccacttcattcccaggtggcccggtcggggactttagcacaaattcccagtcggagaatcctccccctggtgcgtttgcggccaccggcgtatcctctgtgtcggtcgatgaccattatggccttcatattatgcttccggcctctgggtcgtcacccacagtcccggtatcaatcacctccttgaatcgctgcatcgtggatatgtccattcccaccgccaacggaaagccatacgccagtctgactgccaaagggatcaaagaaagcttattaatctgtggtcaagtcaatggccccgcacacatcaccggtgttaagaatagcgtgatcgtgatctcatgtcgccagttccgcatgcacgactgcagcgacgttgatgtctatctcagctgttctagcaaccccatcatcgaggactgttccaatattcggtttggtcggatcccgaaggcctatgtcagtgttctcctcgtcgctatatcttttgggtttaacttacattcttctatctaggccttgaggcatgaccgtcccgatcacgaagaccgttggagccaggtcgaagatttcaaatggattaagcaggagcctagtccaaactggaggctgctcgaccccaacgatgccgttcctgaagaggtctgggcagagattgttcccggcgggccgggatggtctcttgaggacatcttgcatgccattaatgtagtcccaaactagttttatccgcttggtcgttcgatgtcttacttcctgctttaatggacatgttcctgcaggacgcatcctcgatatcaattgtcatcatgcgctcacgagattgattacgccattcctacttcgaataatttcaagttctactcttttatttttgatgccaccattatcaattacgattttttgcaatgtttgaatttgtggaaggattcaaggttattgcgttacttcagcatgtacttgtagactcagctatatatctgtaactacacacagaaatatacgagattgacgaaggagcatatactgacttgagtgtaatgtacaatctctcatttagtgggagaggaatatatattttaggcgcctatgcagcctagtagtctgacagtatgaaaacgtttttcatgctaacattacgctagccttttggatgtcgtttatagcccggaggatgaagataattggcaaattacagaataagacataaaacgcctttccaggtttaaatgtgatcaataacattacttttgagaggtagactaggtcactgtttgtgatctgcaaaagttcaaggattacgcgttccaagttgtgggcactttggggtaattcttcgcgtggtagcccaggtcttcatagacggttgcatctcctaggattcaggtcagtctcaggatcaacagaaaattaacgtcgcaacataccttggagggaatcaacccgatgctcgtcttcgtctgccattttctccaattcctgaccaggctcttcctccttaggctgtttatcacccatagaagacgcagccttgccaaggtcattctgcgccgagccgatcatgaggaattgagaataaggatagtccaggaactctggctgcagaggcacccatcggagatctccgaatttctcaagtaccctaacgagaacaatgttaatatgagaatatttaaatcactccatggaagacagcttacgatggagggaattctggattctttggtaattgaccaactggtggaccaggaaacttgggactcttcgactggacgatccaacttccgcgttcttgcaggccaaagtcctcctggacatcacccaactcggccggaatggtcaggatataggcgagatgggatgcccgaggtgcggaggtgatcgcgtagacaccctccgcatagggtctggctgcctcggtatgacgttcacctcgggtggaagtctggtaggttttaccagcgatgaaattatcgtggagagcttgcatggattgtccagccttctccacaaatcccatttctcgttctctggaagaggtcggaaacttctttttcgggagtatcatcaaccgacacgaggcgtctttttcgacggagtcttggccgttgtcgaattccgctccaagggcggttggacggaggacaaagaagctccgcgcgacatcgccgaaactttcaggctcgtctacatcgacgcgtgggcggaagaaaaagtagatgaagcctttttcgagaatgttggagggtactaagttttccctctcctcggacttatgaagacctccctcaattccttgcggtttctccggatggctttcgactggtttcaccgtcgatgcttgtccttcgggtggttcttctgtcttgacaggtgcttcttctgtcttgacaggtgcttcctctgtcttgacaggtgcttcctctgtcttctgcactaaacggtctaccgatgtacccggtacttcctcttttttcaattcgtctggctttatatcctccgttttctcctttttcggctgtggagcttcatcgcctgaagctctccgctttgttcccttggaagtcttgccggtcggctcggcggaagttgaaatggcctccttggccttctgagcagcgtggcgtgaggatgttcgtgtagccatgatgaatggtggattttgtggacgatggtgaagatcaaatctgatgaagcaatgggatttagcccctagggctgtaatgagatacagatgacgtcatgtcgtacgttgcaagtccgcatccgtgactttgctagaaatgaccgctcagaatgccattataatagaagtttcagtcgatatccatctcatcggccatgggccagttgttcatggggtcgttgccgttcaagtcgatcgatgctgtctccgaaccggagctttcattctcgttggcttcccggaaagcgccaaatgagtctatgtcttgagcatgccactttggaatttcgctaaacctttgccttttgggacgatgctcatgaacctcggtctgggtctcggccgacgcatgtccttgtgcgaaaaacgggtagcattgttgtgtagcgagagtgttgtgggctggctttctcttctgtcctctctttcgcgccgaaggaattgtattgctattcgatccatcgggttcgtagcccatgtcattcaggtagtctgtcaagtcgcgctgccatcgttcgaaccgatccgggaggcatagtcgatctaccctgggtaggctagtttctaactcatcatcaggctcttcgatatcgtagggcttgatgactcgaatttcgtcattgtcctcgagcggatccatgtcatgcgcaggcgttgagggtcctgagtcgtccatactctgctccctttccttgggctgatggtctgctgcagcatcagaagtaaggtcggcgaagtattcaatgggctccttaaacttgtcaggactcgtatcattcattggaaggtcttccattatctgatatcaagtcttgaacccaaacggcgttgacatggcaatccgaggtagacggtcaagttgcaaaaaccataactgagctcccaaggcaggaatgatggagtatgtgactggagaaatgtatgctattaaaaaataaagtacaatgaagagatcaggaaaatcgcacgagaatggaacgcgcaagaaagccatggtcgctataacatcatggccttccagatgcttctaacgtgggggtgataaataaccgcatatatgtccactcgacgttgaactttggatgccggttcgaaaaaagagaaaccataataggaatgcaatatactatgagaatatatcacgattccacttcgaccctgatctaaaaataatcaagtctctttggacagcgtaaagatcgagaccagctcccctgacctctcaccgcccggcagcatgattggccgatgtcattcgcttccacaatagagtccacgtttagttaactgctacactaacacaagcatcaagtgtttacctttcgctcttttctttctttcaggtggatgcggtggtcgcctctgccttatattgctctctagtgtgcggagcttgctactttacagtgcggctccggccaaatcttcaagatgcagtcctccccaaacatgctcaccaaggtacaccccctcgggcatcttaatgcgccatcgaacaatgggactcaattgaagatgctaatcattctctcaattgtttagtttgagtccaaatcctccagagctaaaggaatcgcgttccatcccaaacggtcagtcaatcccgcggagggacacctaacacctcaaagtgctcaatctgaccacaaaacagaccatggatcctcgtctcccttcactcatccacaatccaactgtgggactaccgtatgggaactcttatcgaccgattcgaagaacacgatggcccggttcgcggcgttgacttccacccaacccagcccctgtttgtatcgggaggtgacgactacaagatcaaggtctggaactaccagactcggaggtgcttgttcacattgaatggccacttggattatgtgcgaacagttttcttccaccccgagctgccctggattctgtctgcgtccgacgaccagaccatccgaatctggaactggcaaaatcggtcactcagtaagatgcattggagctacctgcaataacatcgactaacacgtctactctttttagtctgtacgatgaccggtcacaaccattatgttatgtgcgctcagttccaccccaccgaggatctcattgcctcggcctcgttggatcagtcagttcgcatttgggatatctccggcctgcggaagaagcactcggccccaacctcggtttccttcgaagaccaaatggcaagagccaacccaaaccaagccgatatgttcggaaacaccgatgcaatcgttaagtttgtgctggaaggtcatgaccgtggtgttaactgggtctcgttccaccccacactacccttgctcgtgtcagccggtgacgaccggttggttaagctctggcgcatgagtgatactaaggcatgggaagtcgatacttgccgcggccatttccagaatgcctccgctgctctgttccacccgcaccaagacctcatcctttccgtcggcgaagataagacgattcgcgcatgggatctcaacaagcgtacatccgttcagtcctttaagcgcgacattgatcgattctgggttatcgctgcccaccccgagatgaacctgtttgccgcgggtcatgacactggtgttatggtcttcaagctcgagcgagagcgccctgcgtctgctatctaccagaaccagctgttttacatcacaaaggataagcacgtcaagtcatatgacttcagcaagaacgtcgagtcgccgccgttgctttcgctgcgcaagctgggttccccatgggtccccccacgtaccctctcttacaaccccgccgagcgtgctattttggttaccacgcccgccgataatggaacttatgaactgattcatctccccagagatggtactggggctgttgagcctacagatgttaaacgtggacaggctacttcggcagtcttcgtcgcccgcaaccgctttgccgtcttcagcccctcgacccaacaggtcgatatcaaggatcttagcaactccacaacgaagacaatcaagcccccagcgggcacgaccgacatctactttggtggtaccggatgcctgctcttcatcacccctacacatgttactcttttcgacattcaacaaaagaagcagcttgcagagcttgctgtcagcggggtgaagtatgtggtgtggtctaacgatggattgtactgcgctttgctcagtaaacacaacgtcactatcgtgaccaagacactcgagcaggttagcaccttgcacgagactattcgcatcaaaagtgctacctgggatgacgccggtgtcctgctttactccacccttaaccatgtgaagtactcccttctcaacggtgacaacggtatcatccgcactcttgaccagactgtatacctcgtgcgcgtcaagggacgcaatgtctatgctcttgaccgcaacgcccagccacgcatcttggagattgacccgactgagtatcgtttcaagcttgcccttgtgaagcgaaattacgacgaaatgcttcagattatcaagacctcgagtttggttggccagagcatcatctcttacctgcagaagaagggttacccggagattgctctacaattcgttcaagaccctcagactcgctttgaccttgcccttgaatgtggtaatctcgaggtcgccaatgaaatggcacgggaactcgaccgtcccaacttctggaccagacttggagctgaggcattggctcatggtaaccatcagatcgtcgaaatgacttaccaaaagcagcgtagcttcgacaagctctctttcctctacctctctaccggtgaccaggagaagctttctcgtatggccaagatcgccgaacaccgtggcgacttcacctctcgtttccaaaacgccatctaccgtggcgacgttgaggaccgcattcagatgttcaaggaagtggacttgtgtatgtacaaccctagtgccgattgtttctttcatactaattctcgcagaccctctcgcctatcttactgccaagtcaaatggtctggttgaagaggccgagtccattttggaggctgttggtctcaccgaagatcagattgtcctacctacactcgatcaacctctgaaggttcctcaccctattgtacccactttcaattccaattggcccgttaaggctgccggtcactcgtccttcgagaaggctcttcttggagaagttggtgttgctgatgaggaggctggcgctgttggattcgagattgaggaagaggagcaagaagctgatgtcgctcgggaaaccctcgatgatgacgaagaggcagtttccggatgggatatgggtgatgatgttattgttgaggaagaaatcgactttgtcaatgtggaaagcgccgaagctggcgccggcagttctgaggctgatttgtgggctcgtaactccccgctggctgctgatcacgtcgccgctggctcttttgacactgcgatgcagctcttgaaccgtcaagttggtgccgttcagttcgctcctctcaagcctcgcttcctcgaagtttacaaggcgaccaagacctacctcccggcgactgctggtctaccgcctttgatcaactacgtgcgccggaccatcgacgagactgactcccggaagatgcttcccatcattccccgagacctagagaccgttgccagtgttgacttgcaagagggttatgccgctatgcggtccaaccgattggaggagggcgtggcaacattcaaacgtattcttcacactgttctcgttaacaccgtgtcatccgaagccgatgtggatgaagcgaagaagatcattgccactgctcgggaatacattctcgctatgtcgatcgagctcgagcgccgtactctctctaccaactcccctgaggatctcaagcgtagccttgaattgtctgcctacttcacaattcccaagctcgaggtcgctcaccgacaactagcgttgatggctgccatgaagttggcctttgccaacaagaactacggctcagccttgagctttgccaaccggatgctggctaatggaggctccgctaaacttttggaacaggtaagaattcttaaagttcaattttccacttataatataccaatgctaattatgaaaaacaggccaagaagatcaaagctcaatgcgaacgcaatcctcaagaccagatcgacattgacttcgaccccttcgccgagttcgatatctgcgctgcgtcctttacccctatctatagcggctctcccagtgtctcagatcctttcaccggcgccaaataccatccccaatacaagggaagtgtcgaccggatatcagaggttacggagattggtgccccggccagcggcctacgcctgttcgtccccagtcagttttaattgccgcatgacgaagcataacggttttttgccttttttctcttcttgaaatgaagttacaaaatgggtacattttcatctgcacgaggagaagttgtgtttggcggcgctattcattttttttggctgggagaaagacaaaccttcctgcacacagtaccagtccccttgtctagatgtctttttgtatccaagattataattgcttagcgatctagtttgtatgcgaacatgttttgtccaaaagctctatctcctaggtattgcccaaaggtcttgtcttcgcctggtattcatgtattacccgcttagtagtgataaaagcaatccgtctttatttgccaaatatgcatatctaatgtacaagggagatctaaaccgaagagtagagagaagaccactccaacaaaaacaccataaacgtacagttcaattacaccgaccatctttccacccagttcgccacctctcttcccacaatcgacaatcaaactccttcttcccaagctttcgattgacctcattatgcgcctcgcacatccaccacccaaactccttccggctctccagtctcggctgattccgcccactcggatgcgccatccatctctggaaatcatccgcgcacacccagcaagggtacagctttgaaaagaacttcaagaacccgcccatattagcctggtgttccgtatctgccttttcggggtatgtggctgccatcgagtgcaatagtgtccatgtggagcgacctagctcttcgacgtctggcgggcagtctgagggagtttcgctcggggagggggttgcagcggcggccagagctggcgttgaggtcgtcattttgcctgtgttcgaattgggggatgaggtagcgttggagtttgcattcttgagttcggcttgcttggtcaatgctcgccatgaggcgacggaggtgcaggtgcggcagctgtaaggtgggtatattagcgccgatctcggttacggctagtcgtagatacgtacggctttccatctttgtccaggactacacccttgggcaatggcgcggctttcgggtcatcgtctccggttggcttggaggagcttgcggagttcgcgggggtttgctggttgaatatggaccctgtgcctttatattgactactgacttccggtggagccgatgccatttttcacctgtgattatttgaatccctcgacagattggtgatttggagtggtgaaagtgattcgaggttgatttctaatggattgcggagaaacaccggaggcgagaaagaggtaatagtgacggatatttggcgcaacagtcagtaaagagaacttggaataagctagcaagatccttagaatcaatgagctttgaatatgtagatccagaaactgagcccttgagcaagagtcgcaaatgacatacaagtctaatgtcatgccgatcaatctcgatccggctttgtcatccattcacacgcgctcgctcaacccagacgcgctcaagttcgcagtttgattgagataaataaatatctttcttctattactctgctctttggtccttatttcctcacatatcgtccgaggaactggacgattcatacgaactcgctcctacaccattaacctcctttcgatcgccatagagtgacataaacatgccgccgaagtatacgttgtccgactctgaagctgagggtgaggcacccagcactccctctcatcagattctcgagaagagccttcgtgaccaagtggctgcaatcttcaaggcgggaaatttggaggaattgaccgtgaagcgcgtgcgacttgctgcggaaaattcactaggtctcacagcggggtacttcaagactacaggtgactggaaagcgcggagtgaagatataatcaaggacgaggtggtgagtctttgtttgcatttgcagtgcttctttagcttgcgcagcttcagcggaaagacactgattgcgatgcttttacagggaatacaagatcaggcaatattagatccacaatcacaaacaccttctccctcgaaggccaagcctactgcccttgcgaaacgagcaaaatccgagaccgcaacaaagcccaggaagcgccagaagactaagacgccggtatccgatgaggaagatgagctaccggccccgccatccgagactcatgaggtcacaaagcccaagaatcgatcgaaggcacctataaaaaaggcacccgggaagaaggtctctgtacaaaaacacaaggacatgtcagacggttctgacttccctggtgatgagagtgatgatgtcgcaaagccgaataaacgatcgagcacgccagtgacgaagtcccctttgaagaagtcgccagcaaagaaggcctccgtaccaaaactcaccgaggatgtatcagatgttcccgacgatgctttgaatgccacaaaaatgaccaaagataccaaagatgattcggaaagcgagatgtcggtggtgcttgacgaagagccccagcctaaggccccacgcaagcgacaaagaagtgccggagaaactgcaaccaagacgaagaagaaagcgaccaaagccaccaaagccaaggaggaggatattagcccggaccaggctgaaatcaaacgactacaaggatggctcgtcaaatgcgggatccgtaagctttggggtaaagagctggcgccatatgacacccccaacgccaaaatcaagcatctcaaggggatgcttcaggatgctggaatgactggccggccatctcaagagaaggcaaaccagatccgcgaagaacgggagctgaaagcggatttagagcagatccagcaaggcgcaaaacaatggggtgccgtgagtgacgaggataatgatgaggaggcgaagcctcggcgtaggctgggtcggggacgacagtcgcttgcgttcttagagagtgagggcgaagagactgattgatggatagcatagggtccgtaatgaatgaatttgtcggactggttgagctgtgatgaaatcggatgatgcgttttatcactatgtatttcatacttcatagttcataatgtccaaaaatatagcaataggagtctccctcatcacccgactttcggtctactcatgcgctgcgcagtcaggctgaagatggcaacagaagagataaagaggacgagattgtagaactaaacttgttagcatgatcaaatcgactcgaggggtccattgacatactgcttttcgcgagtactcgttctcctccgcctcggttctagcctcgacaaagaggcgtcgcaagttagggaggttagcctgcagaagtgttagtcttggtggttggataatttgactgatgtagaataaataccatttacaccgtgatggtctggactaatggcaaaataaatgaaagagagagttgatggccatagagcgggagagtccagaagccaccatttgtggacaactttgatcgtccgaaacaccctttctctccttcgcccccattcctcctcgaaatctacccaccccggattgttcacgcacctctctgtgtttgcggacaaagtgacgaacaatctcgacagattccattccctgacctcgcgcgaccgtgaagctcccaatcccccgcagtcgccaaacgctactcgattcccaccccaatcccatatctctaggcggaggcacgacctagtcgttgctgaagcttatacatcctcgccatggcgatgaacaagatccgcggcgcctttgcggtgcctcggaaaggagagacatttgaattgcgagctggacttgtgtatgcggccccctccaccatgcgctggccaccttgccatggcgaatgatggatgatattaactattatgacagttcccagtatgcgtatgaacggtatgtatggcagtgaatcctcagtctgcccctggtagtatatgacggagacgtggtttggctgacaatgcaacaggaaggaatccattcaaaagacaatcatggccatgaccctaggaaaggatgtttcggccctgttcccggatgttctcaaaaacattgctacgtccgatcttgagcagaagaaattggtctacctctatctcatgtgggtaccaccgtacaactcaaggtggctacgtatgctgatcggtcgaatctcactttcaggaactacgccaaatcgcaccctgatctatgtattctcgccgtgaataccttcgtgcaagattcggaagaccccaacccactgattcgtgcgctagcaatccggacaatgggttgtattcgggtggagaagatggtggactacatggaagaaccgctgcgcaagaccctccgagacgagtcgccatatgttcgcaagaccgctgcgatctgtgttgccaagcttttcgatctgaacccgacaatggccatcgagaacgggttcttggagatgcttcaggagatgattggagaccccaaccccatggtcgtcgccaattcagtgaccgcacttcaggagattcagcacacagcacccgagacacatgctctacagattactggtaacactctgcggaagatgctgatggctttgaacgagtgtacggaatgggggcgcgtgactattctctcaactttggccgagtataagactaccgacgtgaaagagtcggagcacatttgtgaacgtgttgctcctcagttccaacatgttaatgccggtgtggttcttgcggcagtcaaggctgtgtttttacatatgaagaacgtcaaccctgacttgtcgaagacctacctaaagaagatggctccgccattgggtatgctcccacgctgctctcattgcacttattttttactaattctgtatagttacattggtttcatcagcccccgaggtgcaatacgttgcattaagaaatatcgaccttatcttgcaaaaggagcctgacattctcaacaaagagctccgtgttttcttctgcaaatacaatgacccccaatatgtcaagttccagaaacttgagattatggtacgcatagcgaacgatcgcaatgtggaccagctccttgctgaattgaaggaatatgcccttgaagtcgatatggactttgtccgtcgagctgtgagggcaatcggccaggttgccatcaagattgagagcgccagcgagcggtgcgtcaacacgttgttggatctcattaacaccaaggtgaactacgtcgttcaggaagcgattgttgtcatcaaggacatcttccggaaataccctggctacgaaggcatcatcccgactttatgccagtgcattgatgagttggatgagcccaatgctagagcagcactcatctggattgttggagagtacgccgagaagattagcaacgcgggtgatatcttgagtggctttgtagatggtttcaacgaagaattctcttcggtttgtttttcctcctggtatatgctaccacctcgactaacctatctagacacaattgcaaatcctcacagctgtggtcaaactcttcctcaagcggcccgagaaggcacagggcctggtacagcgggtactccaggctgcgacatccgagaacgataatccagatgtccgtgaccgagcgtatatctactggcgtcttctgtccaacaccagcgatccaaacgcgacaaagaacatcgtgctctcggacaagccccctatcgtcaccacgatacattcactgccaccggcactcctcgaccaactcctttccgaactgtctactctctcttccgtctatcacaagccccccgagcagtttgtcggccacggccgatttggcgctgacgccgtcatgcgcgctgctatcgagtacgtattcaattccctgtttttgtcgaatatgtcgctaaccacttctcagggaacaaatccaaaacgcgcgcgagaacccattggccgcggctgctgccgctgccgctggcggcaccgcaggccccgcacagtcgcaaaacaacgtcgagaacttgctggacatcgatttcgacggtggtgcccctgcctccgcacaaaccgagccttctggcggcctgtccggcctggagggtctggctggtacccccgtacgtgtagcgtcccctacagctggtaccccgacagcccaaacaagcaacaacctggatgatctcttgggcgtgtttggagactctggtgctgctcaaccctcatcgagcggtgccaacagcagtgatatcatgaacggattctctggtcttgatctctctggtaatgcgggtccttcttcaaacaaccagactaagaaatccaacgacgacatcttgtcactcttctagagcaatggcagtgatggtatagccaagtgtgtttagcccacctactggttgatgttatttcgggtgttttcgcaagcgagcatctgaattgaacgagatagattgttttcttttagttgtttaattttgcttgcatctttaccggacttcaaaaggcctgtacatttctgccccgaatatcaatttctttatgagtttttggcaaagctgccctcatagaatagcatttaccgaccatcccttgtagtggagagataggccagcgagatgcaaatagcctcccgctttttctcggccgatgcaagccacaactccaccgcgtgcgaaaaataggaagaaaacctcatccctgcgctttgaccccacaaatctctgacttctatgcatgaagtatatcgtccaatgtattacagcagattctgtctatgcaggagatatgtactatgcagatgctgctatgctagcccaacttatctcccctactccacctagatagacatcacacacgttatgggccactgggccagtatgggcccctcaaattgcgaattcacacaaaacggatccatcggataagaacgcggcttaccaattagtgattataccgaggtttttccagtgtcaaacgccgagttgggatcggggttcggacctgtcccgcgtccaagcgtataaatagggcaaagctcccggaaaagtggtgcacggtgaacacttccaatccgacaacatggcggaaacagactacaaattcgagggctggatgggtctcgaccctagtgccggcgagggcaagatggtctggcaagaattcgagccaaaacaatgggaggagaccgatgttgatatcaaagtgtctcactgcggcatctgtggctctgatttgcacactcttcggagtggctgggtatgttttatgttttccgtacagacgcagcgttgtgcaatatctgtataaaaattttaaaaaaaccagcaaactaacattccacagagacccactgcctacccctgctgcgtaggccacgaaattgtcggcacggccgtgcgcgtgggtagcaaggtatccgacatccagctcggcgaccgcgtcggtgtcggtgcgcagagcgagtcctgcctcggccgtctcggcgactgcgaggagtgcgcatcaggcctggagaactactgctgcaagaaagtcgtcggcacgtacaacagcgtccactacgacggcagcaagtcgtacggtgggtatgccaggtaccaccgtgtgcctggccacttcgccatcaagatacccgatgccatctcgtcggctgatgctgcgcccatgctgtgcgggggcgccaccctctacagcccgctgaagcacaacaactgtggtcctggcaagcgcgtgggcatcattggtgttggaggactgggtcactttggcttgctgtttgccaaggctatgggggctgatcaggttgttgctatctcccggaagttggctaagaaggaggattcgctgaagatgggcgcggatctttatattgcgactgatgatgagccggactgggctacgactcatgctcggtctttggatttgattgtttcgactgtctcgtctactaagatgccgttcaacgactacctgggtctgctgaagactgctgggtcttttgtgcaggttggtcttcctgaggatggcggattgttcgctcctgttcggagtttgatgcgtcgcctcaagctgcagagttccctcgttggtagccccaacgagattcgggagatgtttgagcttgttgctgaaaagggaatccgcccgtgggtggaggtcatcccaatgaaggatgcgaataaggcgattgtggatatggatgacggaaaggcccgctacagatacgtgcttgccaacgagtaaaagcttataattagatagctagaatagacgagagatgtgcccacgaatgaagatcgaagtgttgaaagtatagccgtctagtgtatctgtaaagattggtctacgttagggccaatcaaaccacgcacgtgagcgccgttctcggaggcgctattccattttgggaactcagatttcccccgcggtggaatgaatcattccgcctcttcttctctacttcggcttcaaagattttctgtttgagtcaattgacggtcgcatcatgtctcctacactatcacaacagtatttaagtacccgcggtgctgagtacggggtgagttggaaaataacagttccaagtttcattgcaaacatgttactcaccaatctatctagagaacctttgaagatgttgttcttcaaggcctggcctcggacggtggtcttttcatccctgaggaaatccctgctcttccccaatcatgggagaccgaatggcgcgatctgagctttgaggatttggcgctcgaaatcatgtcgctctatatctctacggacgagattccccgagaagatctcaagagcatcatctataagtcctactcgactttccgacaccccgagcgcactccttccgtcctccttgaaaagaacctctacttgctcgagctattccacggcccgacctttgccttcaaggatgttgcgctaagtttcctcggaaacctgttcgagtatttccttgttcgaaagaatgctggaaagactggcaaggacagacaccaccttaccgttgtcggtgctactagcggcgacactggttcggctgctatctatggtctccgcggcaagaaagacgtctctgtcttcattctcttccccgatggcggccgagtctctcctattcaagagaagcaaatgacaactatcttggatcctaatgtccacaccctcaccgtggcgggctccttcgaccattgccaggatatcgtcaaggcgctcttcgccgatgcggaccttaactccacccacaacatcgccgcggtcaacagcattaacatggccagaatcctggcccagatcacctacttcttctactcctacttctccctcaccaaaaccgcctcgttcaccaaggaatccaacgtgcgcgtggtcgtcccgtccggcaacttcggcgacatccttgccggctggttcgctaagcagatgggtctccccatcgagaaactggtgattgccaccaacgagaatgacattctcgatcgcttcttccgcagcgacggccactacacaaagaaggccctcgacgcgaccaccgaccacggcgtgaaggaaacctacagtccagccatggacatcctcgtcagcagtaacttcgagcgcctcctctggttcctgtcatacaaaaccgccagcggcagcgaagccgagcgccgcaagatcgcctgcgaaagtgtcagtgggtggctgaacgagctcaagaccaacggcggcttccaagtccccagcgccgtcctcgaagccgccaaggtcgatttcgagagtgagcgcgtcagcaacgacgagaccatcgctatgatccgtgatatctacaagacttccttccctaagggtcttggtcccggctccgccaagagctccaagaccggtgggtacatccttgacccccacactgctgttggtgttgctgctacgcgccgctcgttggcgcgcaaccctgaggatatccatatctctctgtccactgcccacccggctaaatttgccagcgctgtggaccttgctctgcgttccgaggatggttacaacttcacggagatcttgccccaggagttcattggtttggagcagcgtgagagtcgggttaccgctgtcggcgagagtgctggatggcagggcgtcaaggagattgtcaaggcggagcttgaacaggagttgcaggggttgcgatagatccggacttggcaagagaataacgtgttatgaaattcaccgagttggtgagattcaacgggaggagcatgtgtatgctaaaaaaatcttgtgttgtagtatagacatgttggtaacgttttcactgttttcctcccttctattaaaatatatttccagtttttttttacacctataatctgagggcttgttgaatcgatactgaaaatgactgctcagattggacaagtatctgttatcctaagtattagtactattcatgctggataatgcctgaagagatgaagctattcagagatcacctgatctgtcaatatcggcgttattcatcaagtgggatgaccggtggaacttcattggtgactttcctcgccccaccggagctgtcattaccttactcttttcctttcaccttcacttttgtcacttcacttgtgaaatcgaaaggttggcaaaattctgcacaatgccacctcctgccaatattatcccctggttcaaatgtgactatccagattgcaacgctaaatatcggcgtaaagaacacctgaatcgacatcgtaatcatcatgatacggaaatcaatctcgcctgtccttattgtgagagcgtcctaaccaggaagtgagtaatttcttcgatcccgtgggaagactcaacttagagagtaatcagtgacctgttgcgacgccatgtccggacttaccatccgcaaagagaactgcctccgtctcgaaaatttagcgcatgtactgcatgtcatgcacggaaagtccgttgtgaaggtgtattgccatgcaatgcctgtcaacatcgcggcgtcctttgtgtgtctagtggggatgaaaccgtaagcgaacaacaattttcgatcgatgatctctgccctatgccgcctgtttccacgattgatgattccgtttctgacgctccccggtggattgctcatgactatattgatatttactttaatactttccatccaagatggccgtttcttcatcgaagtacatttgacttcgccaaggaaccttgtgtacttgttcaatccgttgtcgcaatcggactttgggtgaaagggactcaggaggcacgagacgcatcgatacgtctacataatcgactatgttctgcattttacgctcaaatggtgagaagaagaagcatgataaaagtaactgcatatagaattgtgtgttgatatcatctttttgctctaggaccaatggtgcatctccaactccagtccacgccaacacataaatacatcgtggcctataacatcatttcaaagtgtgctcttgaatatcattctttctcttttcattgcaagggagaatgctagtacagatctgagcatgcaatgccgattaccagacgacaaatacgacctcttggctgcgcttgttcaaagctgtcgaaggtcggggatcttctactaccctaacatgcttctgcaacacgatgccgatgcaccactcgcgcttgtatatgtgagcgttgaagagatcaagagatttggactagccctctataaggtgtgccgattgtccactcccgcttcctttgacttgagcggagaatgttccaatagtggcacaaccaatcttttgaccctggccgacttgtccttttgcatgccagacagtgatgagctgtggaatgctccattgggcggtgagtccgaggtgttaaacaagtctgattcatccgcagtcggacgggataatggagatgcgaaaaactggatatctcaagcatctgctcttctacatgacgcacgagttggctttgattggatatagcagaaactatcttacaagatgcggcttttaagccacagatcacaggccataagggcaacaatcgaacatattccctccggttgtccactcccacttcctttgatttgagcggagaattttccaatggtggcagaaacgatcttttgaccctggccgacttgtccttttgcatgcccgacagtgatgagctgtggaacgctccattgggcggggaatccgaggtgttaaacaagtccgattcatctgcggtcggacgggataatggagatgcgaaaaactggatatctcaagcatctgctcttctacacgacgcacgagttggctttgattggatataggagaaaccgtcatagaagatgcggctatttcgccacatatcaaaatgcagcctataaatgcatcgaacatattcccttactattttcttgacaaatacctttgtaatatttttttgtcaataaacgtacattggatctgcaccttcgccaccccgaggtccacagtcaccgatccttgaccgggtgggatggccgtaaagtgatcggcctccaggtgggatggccgacccgtttccccgcaaaaccatagggtttctaagcaaagagtaacgaagtacatataaaccggctcttctttttaatatcgagtgttcctactgcaacataatccaatcctccattttctaaaaacctctttatctacaatggcttctaccgctcaatccttccgcgagatcgtcggaattccccgctcctcagcttccccgaaggactcaaccctcatcattatcgacgcccagaacgaatacgccacaggcgctctcaagaccaaaaacgttacagaaacccgcaaatccatttccaaactactggaacgttaccgtcaagccggtaacggcaaaaacatcgtgcacgtcgtccacgaggtgcccgaaggcgcacccgtcttcacgccaaacactcccttggcacaagagtttgaggaactcacccctaaagcgggcgagaaagtggttaccaagaactttcctagctcgttcgcaaagaccgatctgcatgactatctgcaaggtctaggcgatgtaggaaagaaagtcgtgttggttggctatatggcgcatgtctgtgtctctaccactgcccgagcggctgctgagcttggatatgatgtgctggtcgtgagggatgcagttggtgacagggatatccctggtgtaaaggccgaggatctggtgtctgttgtgttgagtgagctggcggatggtttcgggactgtcgtctccgaggaagatattcgtgcataggcaactgatgcaatctgaaactgcgaggactattggatcgtattcaaaatcttcggactgtatgaaattctttcctatttccgggcctctaatatacgcacattgtgccgtgttctgataacagattcttagtaggggaatgtgatcatcacgtttcgggtaaaggaaatagtgtaccggatactacgccaaggatatgccaagacacgccaagcacggacgggtttgcggggcaatcaacggcttctaagatgttcatgtcaatggatgccggtccataccttaattgtctcaattccctattgcctttcggataatttccgaagcccgttaagtcccactaccgcggaagaactgacagtcttggcaatggaaatacaacttatagatagtcgacatttgttgaacacggaggaaaaggttgagctggaacctgcagtacgcaataaccttggagctgcatgtctcagttcaaggctaaaatttgaattttttttttttttgccgacatgtggcaaggggtgtgaccctggaagcactggcgatgccgtcaaatgagagaaggaagtaagcgtgtggacccgagatccaacctcccttggcgctgttcctcgttgcttctcgagttcctttggccttggctgtgctggtttgatgcttgatcaatagaaaaatctggagttcttatgacttggtccagaaaacagagcgagggaaagaaatgttggcttccacgttggctttgatatttctgagtccggtttctcccatagtcttccccgtatgtagctcacctatgttcttttctcctctttctcttcaggtcaatcattccagatagcccaatgcattcgtattgatctcccagcttcctctccgagactgttcattttaagagtattccctcatgataggtttcaaggtagcgaacgaggaggatgacggtctaactgtatatggtagcgagtggtattggtttatgtaagagacttaatagtaatagtgatagttaattaagaggttatatctaaggaagggaacaaatgtgtggattattagtaagaatctggaacgataggatgataattggtgaagatatcattagctaccgatataagtttcggctcctttcaagtctaatgcggtcttcggaagcttactttacttaatttgaagatggaatatgatagagtcctactatatgcagttgcaactctggtaaccgatatgccgacccctaaaacccatggccacttccgaaagtcgagccgaatcccgacttatttgcctgaattgctatggatttacgggtttacgggtttgcaggttctggcgcagtctagactctgcacttatatggacgttgaaggtgggaagtcatgacatcattctccttctacgtcgttagtctattagacttgatttctttatcaaaacggctaaaatctgtaccgaggcagaggcgcaagttccactaaaagattgcaattgttgcgttctagaattttgatatcatcttttgaggacgataatctctcggtcatgccgagtgataggttccctctaccgagttccaaccttaatatacatattggaagtttggttgagcctcacaaggctggccagtgtcgtgggcttcggattctttttaccgccaattcttatttcacctgatgggtatcaagtttttcaggtgtaaaaatcaggccatgatagatagtcggaaccggcaaagcctcggagaaatcggaaatagtagatgtcaagcatacatgttccatctataaatcagtatgttccacctcaagttcgcctgtgtgcaattgttgaatcgtctctttttacagaattctgactacacctccaatatgtgtttttgcgggatgtgctcttgcaactctggttcgaaatcagtcgggtcacaatccgttgagaacctggtgtacgaaattgtcaaaccgagctttccttgcggtgagaagctcagcaatagaagatgcttccgcagagcttcaaagatccttctcatcggtgaggtgcctggttcagagttataagcaatccataacccaacgcaacaggatcctcggggtgtgggaaatcgaccgtgatcaaaaagctacggatgcggttcggtcgagacatttcttctcgcgaaaaagaggaaacccgtcttgttgtttacgaaaacatatacagtgctcttgcatgtgctattcgtgaactacaagcccagggccgtctcctggacaatgcggatgatggggtaaggcttcaatcttcaggattcatggcaatacactgacactaccaggtcattcaaacattctggagcaatcaggagttcggaatgacccaaagtcgatggaactgcgaattgctcctatcaatgcgggaattgtgtcacagagcaattgttctggccactgctcttcgattcatcaatccggagagctatctcagaatgtacgcagctgggtcatcttgcaaccaatttctcctcctggattccatcatggaccacggctaatgtatgacaggtttctttcttcctacagccacgttctccagcccgagtggaatcctaccgaaacagacgtaatacaatgctacgtcccaaccaagtcgttgagtggtgcatggatcagcaaagacctcatagcattggaggccaatactaaacatacgacgcaaaaagaattgtccaagattatgccattagttgacggtattgtgtgcgtcgcggatatctcaactctcgactaccgatatatggtagaccccgggaaagtgagtctaactgtgccactccccttcctttctaccccagttgctcaccaaatcaagtctcaattcaatgaatcgctgggccttctcgaggaagtcctaagcagccggggtccccagcggaagccgatccagctcttactgaacaaaaccgatatactgcgcaggaagctaaagcacctgggagtatccttgtattccgagggcggactcttgcaatacttccctggttcggctgaatccgttgccaagtgcttcaaggagcacttgggatattgcgacgagtattatctacgggagatttgtgctctggacgcaacatggatgaaccacattttcaaggtgtggcgcgaaatgatgttcaaatcaaagcttcttgctgcaggtgttatgtgagaatcgggaatggctattttatctgtatatacatgttgcatatccttctcatctgtctttagccaagtatcttagacttagatatcagttagacctcccacttctcatgattaatgaacaaccaactatttgagacatttatgcttgacagtaaccgaatttcaagtgatttcataagtcttgagccattaaatagccaacccaagtaagtctatgtggcaatactctctccagccacagatgtcatgacgtggtccacttttcaagtaaatcatagttaagttttatcatcttgaaacctaccttacttcttattttttttcgtaaagtctgaatctctatcgttgtccatctctacctaccatccctcgatctgcactgaatcggcatgcattttcacaacagagactcctcctttcactcgacagataccgcccagaattcgccggattcggcgtcctatcacgaaaatgataaacctccatcatcgccatctgtcgagctcgttccaggtcaaaagggtcgactagctggtgggaagtatctccaaccttccacctcccaccatgaacacttcacaacccttgatttcgactttcctttaactggcaccaaagcgatagtccaaggtggtaagcaatatatcttgattgactacacctttggagacaaagagaatccattcaattggagcccttggaagaaggcattagtctcaggcctcctttgtttgatgacccttttcatcggcctagcgactactgcctacagctctggtatcacccgaatgtgtgcagatctcggcgtctccttggagctcgggcaaatgggtctgttcaccttcaatatgacctgcgccttggcaccattgttcctagcacctttttgcgaacttgctgggcgacgcattgtctacgcgggtgcatacgtggggttctcgattatgtttattggccttgcactaggcaagaatatcgcaactattctcgtatgccgagcgctgctaggtctattcggttgtgtagggactattcttgtcggaggtacctttggcgacatgtaccaccccgaggatcgagctatccctatggcctcgttctcgtatgtcgcaattctcggtaccgttgctgctccaatctacgccggcttcatcgacgagacaattggctggcgttggattgaaggaatccaaggtctagcgaatgtccctcttatgctcatcatcgtattcttcttccctgagactcggggcagcatgatgctttctaaaagggccaagattctacgttcaaagacgggtgatcaacgctatgtcgctctgaacgacctcgaagcacctaatttgaaacgtatgctatacaactcttccgtaaaagcagttaaaatgcttattacggaacctgttgttttcttcttcggtctttggattagctttgcttggttcttgacctttctcttcttatcggtgatccctataacctatgaagaaaagaaaggctggagcgagggcgttgccggcctcccatacatcgcgctctgcatcggcacgaccctcggcttcatgatgcatttcctccaaattcacaaatacaatacagtccataaagacaagaccgatgaagaaatgcgtccggaagccagactttacggtgtcatgtttggagccgtcgcgctcccaatcggcctgtttatctactccttcacacaatacgcatatgtacattggatcgggcctatgatcgggcttggtctgattacatttggaattttcttcatcttcgagtcgtgctatagcttcacgtcggattgctacggtgaaacttcctcttcggcaatcgctggacagggattcatgaggaatacgctcggcgccgtgtcgcctctatttgcttcccagttctttcataatgtgggcagccaatatgcaggcctgattctgtcgatcatagccgctttcttgactgcgatcccttatgtgttgtttgtttatggtccggcaattcgatcccgatctaagctggcgagtgtgcctcagcgtcggcctagctccggtctttgaagactatcagtgcggtggagaaggtccgatgccggatgtcaagaatatttgagtcacattttccatagggatctatattggactattggactattgacccactccgaggagaagagaatgtaacaaaaacagaacgatctacatgtgggcagagtgtataattagtgaataacggtatagttaagtggcagtaacgtggataatttaagatttacagaatctgaaacatttagataagaatttcagatatttgcattgtgggaattcgtattactttgactgagccatgtaaagctcactatgttgaacgcaaatgtatcagaattccaagcagaatacactgtacaggctgtcaggtgttagacttgtcattcttggactccaaaatccaggcctaccttcagggcctgatgcgtagatgcagccccaaaggtggcgtatgcggttgttgcctcgtcgaatgaataatctgcaacaaacaatcagatagaatgtcttcacggtcgaggtttaggacttacgatgcgtgactagcgagttgacgtccaacttgccctctttcacttgctgcagcaaggaggggattgagatcgcattgaccagcgacatgtggatacctaggacaaattagcacagaaaggaagcatcaatgaatacttgacgaacttatgtttcggtcccataatttttccaaatgtaaatccacctttttgccatggactcccatattcgcgatgcgcccgccaacagccaccagctcttggcacaattggaaggtagctgaaatgccaaccgcctcaatgacagagtcaaacccttcatttttggtcaagtccaggagctgtttctttgcgtctggagcaccagagttaatcgtataatgcgcacccaattcccgcgctttctctagacgcgtatcgtccaggtcaaccatgacaatcatctcggggttctttaggcgcgcagtaagaagagctgcaatccccaccggacccgcaccgacaatcaccaccgatcctgctgagtggacgtctgaactgagcacaccgcattcatagcctgtcggcaaggcatccgagaggcaaaccgcatcacgtgcgtctatagaggagtccaagcggtggagcgaccgagttgcgtgcggtacgcgtacgtactccgcctgggttccatcgagatggttgccaagaatccatcctccggattcgcagtgggcgggaatacctcgctgacagtaacggcacgacccacatgatgtcatgcaggagataaccactcggtcacctacttgcaatccttgcacggtggagcccaaggcctcaacaaccccaacgccttcgtgacccaagacaacgccagattctgcggtttggatgtcgcctttgatgatgtgcagatctgttccgcaaatggacgtatgcagcattcgcacaactgcgtcggtgggctcctgaatggttggcttgggtcgttctacgacttcaatcttgccattgttgcaaacaagacccttcatggtttcttggattaaagtgtaagaggtgtgggaaaattgtcggtgcgagttgaaggaaggaaaagaagtcgacggcgtgataggagaaatggaagggttgggtctttgggaatttatataccagctctggaggggtggagaacgtggtaatcgtcgaggatagaaagatatggcccttattgacgtcaggcagcctggcttggtggacctagaaaactaaaacaaggcattagtcgtgatagatatgcttatgcattgtgtgtgggactcgtacattgttcatgatgtggatgttggaaacagatcgcggtttcgggggcacctcggaaatatatcagccagatcagctgattgtagagagtttcgagtaatttcaatagcttcgggcggaggaaggtgattggttcagccgtaagaactagttaactagccggactcctgctcgtacgttattgagttatcctcgtacgtttgccgttagacggataaggaatgtcttggccggcctaacatatccgagaatatgcatctttgactttcgcatgattcaagcactgagtcatgacggagaacaataatactttctttgtgtattatcaattttgaatccatttggccggaaccggaagaaggtggcttcattggaatagttggcctctacagtatcaaatgagttatacagttgccgttaaactatatattgcgagtgacaatatcacaagttccaatcagccgtaaaataataccgcatatcatgatcataagacatactataagagaggcattaaagagtagcatcatgatatttgctaacctttccgttctcatcttccatctatacgcttgaaccaaattttcatgtcattcatagtgaactggacaaaagcgtcaagtgaataacagaatatcagtgcagctagagagaacgcctttgaaaattctataatcaacgaattcgaaaattcctacgattagggctaatgtgtggagtttcctcggaaatttcttaaaacaagataaatcgacttttcattcaatgcatatgcttctcaaacgaaatataatcttcaaaacatacaaagagcgaaataatccaagcaatagacactatattactattagtatacttaaaataagaccgataaagttcacaaaaatctcgaaatgaccaagcaaccgttcttccttaatccttcggccctgttaaaagcaaaaggagaaattccaagcggggcataggccaggcatccaaaaaaaaaaaaaataccgaaggtaccatgaggtctctgatccacaccacgaggaccagagaggtcaggaaccggaagggatccggatctcaataaagagatggatcgaccgtcgaggcttctcaactgatttacaggagagccatgagggcaacaacaccagcaaggaagccagcaacgggcttgacgctggaggcagcaccggtgaactcgccagcggagggagaggcgccgtgctgctcaggggtagagggcgcctccggggcggagggagtaggagagccggagggctgggcagcgggctgggacttagcagggacggcgggctgagtctcgccgggaacagcgggaacagcgggctgggtctgtccaggaacagcggggacagcgggctgggtctcgccgggaacagcagggacagcgggctgggtctcgccagggacaacggggacagcgggctgagtctcaccaggaacaacggggacagcaggctgggtctcgccggggacaacggggacagcgggctgagtctcaccgggaacaacgggggtagcgggctgggtctcgccgggaacagcagggacagcgggctgagtctcgccaggaacaacggggacagcaggctgggtctcgccggggacaacggggacagcgggctgagtctcaccgggaacaacgggggtagcgggctgggtctcgccgggaacagcagggacagcgggctgagtctcgccaggaacaacggggacagcaggctgggtctcgccggggacaacggggacagcgggctgagtctcaccgggaacaacgggggtagcgggctgggtctcgccgggaacagcagggacagcgggctgagtctcgccaggaacaacggggacagcaggctgggtctcgccggggacaacggggacagcgggctgagtctcaccgggaacaacgggggtagcgggctgggtctcgccgggaacagcagggacagcgggctgagtctcgccaggaacaacggggacagcaggctgggtctcgccggggacaacggggacagcgggctgagtctcaccgggaacaacgggggtagcgggctgggtctcgccgggaacagcagggacagcgggctgagtctcgccaggaacaacggggacagcaggctgggtctcgccggggacaacggggacagcgggctgagtctcaccgggaacaacgggggtagcgggctgggtctcgccgggaacagcagggacagcgggctgagtctcgccaggaacaacggggacagcaggctgggtctcgccggggacaacggggacagcgggctgagtctcaccgggaacaacgggggtagcgggctggggggacaatgggggtagcgggctgggtctcgccagggacaacagggacaacagggactgcgggctgggtctcgccggggacagcgggatgagtctcgccaggaacaacgggaacagcggggtgagtctctccagggacaacgggaaccacggtggtcggcacaacgggagcggtggggcctgcggtggggcctgcagtggcaggcacagtggagttgtagaaggtcaaaggcttctcatcgcacaaggtgcacacggtggtcttggtgatggtgatggtgcttgttccggtgacgggcacagtccaggtcttagagccagaggtgatggtagacgaggaagctggagatattgttaggatgtgtggttcaagtggtacgaatctggtagaggttataggacttactagggcaggtggtggtcacataagtgagggtcttggtggtgccaggcttcacagggaagtgaggcttggtggtctgctcgggcacagtagtggttccgttggcccaggtggtggtgctgtgctcgggcaccggggtggtcgaggtggtgcacggggtggtggtattgctgtacaccgggacggtggtgctatacaccggggtagtggtgttgtgcacagggatggtggtgctatgctcgggcaccggggtggtcgaggtagtgcacggggtagtggtgttgctgtgcaccgggatagtggtgctatacaccggggtggtggtgttatgcaccgggatggtggtactatgctcgggcaccggggtggtcgaggtagtgcacggggtggtggtgttgctgctgtgcaccgggatggtagtgctatgctcaggcaccggggtggtggtgctatgctcaggcactggggtggtcgaggtggtgcacggggtagtggtgctgtgcaccggggtagaggtggagtgactgtgcaccggggtggtggtggtagagtgcacccgggtggtggtgctatgctctggcaccgggctggtcgaggtggtgcacgggctggtccacgactcagacgactcagtggacttgctccaggactcgtaggtcgaagactgctcggccggcttggaccagctctcgccccagccctcagcctgggcaggggtagcaacagcagcagagctctgagcagcgggacggatgaagtcctcgccacgagcctgcatgataccggcaaaggccgggctggcaagagccagaagagcaacggaattgatcatttcgagagaacaaagtcttaacaaacaaacttggaaagataacgagtgaagagatgatgaagaaaatttcaatgatggacacagatgaacgatcttatatgccctgtttgagaagactggttccaagtcatgacggatatggtgtgccacggtcgtgtccaggtcagaaaggtagacctgaatcacaatgtcaccatatgaggccgaatgcaggtactaggacagctcaactccagatggcaaaggcacagatggaaggccattggacaaaatctcgcgcaatgatacattcatatggcaaactcagatgcaaacgtgacagactgtagtttcattggggtaagtggtgcaggaggtctccatcttcatccactagagtaacctaatgcggaagcatggaaagagcttggcaatctccatacgtctccacaaactgcgagagtagtgagcaaatccccggggggacagcatattgcttcattgcgatagagaaaatcgtttgataacggttcaagacacatgtgttttggattatgtggccagcaaaatgctcattctggatctccagggttagcagggcggtagccatgactcacctccggacagggggatagtagatcatattcaaacggaaccacaattgatatgacaaggttcctccgattggggctacagaccccacggagacgaatagcctcgtgggctaagctattggaccagaagcaggcaaaaccgcaagtacgaataggcgtgattccatccaagattggagctctggaatgtgggaatagcctccgattgagtatagggccgttccattggtaggtgccaccttgaaagaatgtacacgcgagctcgacgtatttccggagcacaacgatcctataggctcgcaagacatcttttctttgagttattaatcggatgtggcccatcgtagcatcggcggctgcaatcaatgacggggacatctcaatctagtatgttgtactgggttaggccaagcctccactgcgcgaagatggggctttcgccgcattaacattgtggctctcatcagagattgatatcggaaaagtcttcaaccaatccgagaatgtgatctgtgcagcctgcacggttgttattccatttttttttggaacagcagggaagtctagatgtcatccacggatcctggtgaatgagaggtacagcagtgaggtactacgcagatttggccgcaagcggtaagtggatgagcatagtacctcgatatcctgactgccctccatagtaaaagcaaggaacaacccgctttcggtcatatatgatatttccattttaggatagcacgtgacgtagggcttagggcagacgcgtgcacggggcatcgcgcgtcgcgcgtcgcgccttcctgtttgggtccaattaagccccggagaatcttgaaaagagcatctgctttgcccattcgcccacaatgcctcactcagtatcatccggctctgcgcagaatgatgatgagatgccggatgcccctccagtcgagacctcaactgagactcgcgtcagactcgaggatatgttcgacggcgatgatgatggtgatgacgatgaggagttcccggcttccgcagatgtgaagatggattctccgccaaaggaagagtgagtgctaagctcttgtacagtaatattggactcgactgctgacagaggctcgcaacaggcctccagcaccaacaccatcgggtgtggacccagatatcatgctcgccttttatcaacgacttttccccttccgatacctctttcaatggctgaatcatggaattgtacccacaaaagacttcggcaaccgcgaatttgcattgacactgcaaaatgacgcctatctccggtaccaatcatatccaactgctgacctgtaagacccatttcaactttgattgtccgatcccgtttgagctaacacgtatgcccaggttccggaaagacatacttaaaatgaacccttctcgtttcgaaatcggacctgtctatagcaccaacccacgcgatcggaaaacgctacgaggcggtcagatgaagccagtctcgaaggaattggtttttgatattgatttgactgattacgatgatattcgtacatgttgtgtcaaggcgaatatttgtgctaagtgctggtcatttgtgacaatgtcaatcaaggtcatcgacaccgcactacgggaggactttgggtttgaacacatcctctgggtttactctggtcgtcgtggtgctcacgcctgggtatgcgatccccgtgcgcgcaacctcacagatgaccgacgccgagccattgctggttatcttgaaataatccgcggggggtcacaaagcgggaaaaaggtcaacatcaaacggccactacacccccatattgtacgcagtcttgagttgctcaaacacgactttgcccggaccacactcggtgatcaagatacattcgaatctgccgagcaggcagaacgccttctgtccttgttgcctgacaagaccttaaacgactccttacggaggaaatgggaatcctctccagatcgtgccagcaccagcaaatgggccgatatcgattcacttgcaaagaccggtaagagcagcacgttaaacccggcgacgctcagggatgcgaagcaagatattgtcttggaatatacctacccacgcctggatgccgaggtcagcaaaaagatgattcatttgctcaagagtccctttgttattcaccccggcactggccgtatttgtgttcccatcgatcctcgcaatgcagaaaacttcgatcctctttccgtcccgacggtgatgaacctacttgctgagattgatgaatatgacgcgaaacactctgtcggcacagcggaggcagatatccccgacgctgaaggcagtgcgatgaatggctccgacattaagggtagccgtaaggtgcaggattatgaaaagaccagcctgaaaccttatatcgatttcttccgttccttcatcgcaggcctcatcaaggaagagcgtgctggtaagcgtgaacgagatgatagtggccctgttgttaaggctgatcctatggaattctaaccgcatcgtgttcatgtttgttccatttgcctagcgttgccataggattatgactttatgttttgttaattacctccaccgaattttactttggacttatatcaagggatcgcgcttgggagttggcatttattgtgcatggaaccgagttatttgttatcaatcagccttattctacctttattatattctcattcgaaactatcaattgaatagagatagggtgtgtcgatgaagcagttcatgaattagtttacgatgaagcaagatatgatatgaatgacactttttgctaggggttttcaaattgtagtatctacaattatgaaggcgctactgaacattcagcaggtcagatccatgggatggctgtatcaataccctggagataatcgctcagctgtggaacttatcaacttggaagatgttgaaattaagttagagtcaggagtacgagtatagcaatgtaataagtgaagtgattgtatattggaaatattggtacaaatagagtcgtacaagtaattgcactaaagctagccatgatatgttggcacacgggtggtatctccatatcaggcagacttctcattatcaaaaggcgtctctgacaggattaaaaagaaatgggccaaaggttgaatgtggtagtaaatttaagcaccaatgaagttcttgacggctaaagaaaggtattgttagcacgaatcacggaaattttatataggaagggaaacatactctccaaccagcgcaagtactccttctgctccttgacggagatgtagtcaggaaccatattagcgaactcggcgttaaggccacggtcctcgaggtagcggtcccagagaccctgaaggtcctcatcgaggttctcgaagggaggaccggcgtagaggctctggcgagcccagtccttctcagcagtctgggactgagcgagctcggcgttggcgaagtgggagacctcctcgatctggaacacgccgtcctggacaacggtctggatgagaagggcaccattgttgggtttctcgacggtgatggtaacacgggcagggaagctaggctcgggctgctcgatgtcctcggcggaggcctcggcatcctggccgcgggactggttctggaagtccatctcgtcggacaaagaggcgtcatcaaagtcctcctgttcgctgatgttctggatatcggcgacggtaaagctaacacggatgctaaacaatcatatgtattagcattcattgaagggaagaaagagtcgcgaggaattgtatgaatcgtacttctcagtgccgaacttcttggtcaggataacctcctgctcgccggcaacatccttcacctgccactcgccatccttaatagtctcctcgatggattctaattgctcctcgaattcgggaatctcggaagacttctcgtgtctcagctcatcctcgagcttggcgagaagctcgatgtcgactgtaaaaaagtaaaatccaatatcagcgtgaggccacatacgaagtccgccaccagacaagctcggatttcggcggactcttcagatatcatcaacgcatcttaccttcagacgaaggagccttgaagatgctggaggtcgagaaggcagcgtaggcgggcttagtggcctgataccatgattgccggagagcgggcttagggaatgctgggcgcagagccgaagtggcaatggagcgcgagaaagtgcgcgggatagagcgggtgacggtgcgaagagaaagcattgtgaatgtggatgggtctaaagttgatgaagatgaaagagcttgggaaaaagtaaatggagctaaagttattacgagtgccaagacccgcgcttctgttttggccgactttgcgcggccacgcaatttcattcgacgttaggcaaaaaggatatataatgttattggccttgattgaagagaacattgagtaatttggattgagtggaattcatatcgcgattcgctgcactctacgggatgaaagaccttgcgcatggaagaaacataaaattgattccgtaagtccatttttgtatgacactaggctcgctgacccttagtcctcattacaaaatacatccaccatctccccggcttctcgaggtccactgcgtcattgtgctcataagtggcgcaggtgaatactttaagtcggtcccccgggcatggagaaagtggatataggagtagatttatttaccccaacactctgcgcgttccaccctcgcacccaatatgtcaatacaccattcgaggaagatacagtgtgtgtgtgattcatttacgctgtcctctcgtcgaaacgatgtgcagcctaccactactatatgtatgtttctatgtatcgtgtaccacttcctaagcgaacttagagcctcgccgaggcctgctgtggcctatgccgttgttatgtttgcgctgcccttatggcgcgcgactttgaaaccgttaacagtaccctcgcagcttcgatcgcctcggcctacttggcgtttagaccgttttctggtctctatccccttaagcttatccgttattcgtcgattggctcgacagagacgggttcccgatcgcttccggccgtaggagtagactcagataaacgagggataactgataaatgtacgagaccattttattagaccattttattcgatattacgagatttgcccggggcgatacgaaccatcgtttctgagtaaagagaaatagtagcttatcttatttcaattctaggatgtataaacattgaacccgtctatttttgcggggtagggccgcttgataccgcgacgatcgtttatataatcctacgactataagagcacctacttcaactctacttttcagcaagtccaattctagagtcccgaggcataatttaggctacaaactgacagatggcgataataagccctcctcgttcaaatagctcttcttcaaaagaaaatcaatgcgtcaaaaacaagttcgtcgcaaatccaatttgatgaaaaaggcgcacgaatatagtaagttatgtgaagcagacgtctgtgtgcggattcgccttgggaaacaatatagactaaggatgtcgcataaagtctagcggtcactccgcaagggaagtggtcactttatatcgaaaatacagcgacttcgcaatactatcgagtatctacggccacaataaaagcgaacagtataatttatctcaagttcagtagttcattgatctaagatgcaccagcattttcttcctcaagatagcttcgtccttctgagcgtccttctcagcgtcttttgatcgttctcctaaacgtcgggtccttgaaacgtccttttaagcgtcttctctcacccctcttctctcctcacctcttccctccttaagtttctttctcctcggggcccttatcttcaccgctaaacaccaaaactgattgccaggttctattctggttgaccgcattcgtggtctctgggtctgcgtccgagcatcgcgaagacgcagcgcccgatcggttccagggcgcaggttatatcctccagctcggctgcagggagggtaaggagctcatttctaaaccactgggagttgacggtgcgctggataaagccaagggtctggagccgccgcctgaactccattactatagtccagtgcactgccgatctcgtgtgtggttgaactgccagcccagttcctcaaagtctgcccgtgatcaatctgcgagctctggggtccccttccacacctagtcccagaggcagtctacgtatcaggcgaggtcggcggttgagatctcaaagtgggtgccagacgggtccctccccgaaggcccttcaggaactcgtaggtcttggcgccattcttctcctggtggcactcgttccgaaaatcacagccctagagggcaccgcataccgatctcatccccttcacctccgggatgtatcctccgccgtgacttcgcactccagggcatcagtgttccactattgtcgcccagaagtaaatagtactcttgattgtccatcacggagtacctgaaagcgtacccactacaccacctggggccaacgagagccgccaaaatcacgcccatcgtgttcaccgggggccttgtctaatataataattaagtcattccggaaaataattcctatgagaaacgatgtcattttgatgttgtcgagagcttcaagctgaggcagcttattttctagaggaggtggtggcaaaccttcaagtatgctatgacgatttaactgaatgtctcaacgtacgaaatgtatacatcatgatggtgggggcctttacaatatgtacttttagtggactgcagcaaagaccaaagggttcgtttctctcctttccccatttatcagagccagttgtcaaccaaagttaccaaaagatgactatcccagatgaagtcgatatcattgtcgtcggcggtggcagtgctggttgtgtttccgctggccgtctcgccaatctcgatcataatctccaggttctgctgatcgaggcgggcgaagataacctgaacaacccacagtacgtaaatatcactggtgtattgactacatgctaatgcttaacagagtttttcgacctggtatctacccacagaatataaagcttgattctaagacagccaccttctaccattctcaaccatcgaaagctatagatggacggagagccattgtgccagctgcgcgggtccttggtggagggagttcaatcaactttatggtaatctgcacatgtcatttcttgtattgaggttcatctaagtgaatagctaggtgtatacaagagcctcggcctcggattatgacgactttgaagccaagggatggacaacgaaagagcttctgcctctcatgaagaagcctgaaacctaccagagacacagcacaaagcgagacgtccacggctttgacggtccaatcaaggcctcctttggaaactatacatatccaatcatgcaagagtttctccgtgcggctgaatctcaagacattccagtcactgatgacctgcaggacctacaagctgggtaagaactcgacatcctaagtagtaattgcattagtacgtttcggttatatattgacttgctgtggacctctagccacggtgccgagcaatggactaaatggatcaaccgtgatacaggtactgcagtctatctcttatctgatcttgcaacgtatcatactgattactttgtggattaggccgccgcagtgatgccgctcatgcgtatgttcacagcactcgagaagattacgaaaatctttacttgaagtgtaatacgaaggtggttagggttattattgaaaatggaacagcagtcggtattgtaaccgtcccagagaagcctctgaaagatgaaaaaatacaaaagatttacagagcgcgcaagcagattcttatctgcggtggtaccctcagctcacctctcatactccaacgatctggaattggtgaccctaaaaaacttcgtcaagcgggtgcgtccaacttctctcatccccagaaaccttgagatctgtcattctaagaagcttcatacaggcatcgaacctattgtggacctgccaggtgttggttgcaaatttcaagatcatcaccttctgttttctgcatacagagcgagacccgacactgagacattcgatgaattcgttcgcggaaataccgatgtccaaaatgcagctattaatgaatggatctctaaaggcactggtccgttgtcaacaaatgggattgaagcaggtgtgaagatccggccaactgaacaggaacttgaggagatgaagaattggcctacatctgattttctgagtggttgggagagttatttcaagaataaaccagataaaccggtcatgcactactccgtcattgctgggtaagaattcaaaccctctgtgagcttctctccagtttctaataaaaggtcacagctggttcggcgaccatttgcttatgcctcctgggaaattttttacgatgttccatttcttggtaactacaatgaagcacttgatcctatctagctcctaacaagaaatgcaggaatatcctttctcccgtggatggatccatgtgaaatccccggacccctatgaggctccggactttgatgcaggatttttgaatgatgaccgtgatatcgctcccttggtttggggctatatcaagtctcgtgagacagctcgccgtatggatgcatatgctggtgaagtgacctggatgcatcccagttttgcctcggactcgcctgctcgagcacatgatctggaccttgcaacaactaaagaatatggtggtcctgctcatatcacagctggtatccaacatggtaaggaaaccgcagtgattgctgtcgtccatcctttactaaaccatggttataggttcctggaccatacccgtcgatcctggaatgcagctaccagagagcgtgatcagctccagccggcaggcaattcgggagcccatcaaatacagccgggaggacattgagtgtattgagctctggggtgagtatacctacttccccatcttccttcatattctaagcacaattcccagcgagacgtcatgtagaaacaacatggcactcccttggtacgtgcagtatggcccctaaggaaggcaacttcaaagtcaagcatggaggagttgtcgatgagcggctgaatgtccatggtgtcaaaaacttaaagatctgtgatttgtcaatctgccccgataatgtgggtactaatccttacagcgtaagtcttccttgtcgctgtgttctatctcatttccttcagcgaaatctggtattaatgaatgttttttaaggttgctctcttaattggcgaaaaatgctctgtcctgaccgcggaggatcttggatattcgggctctgatcttgaaatgaaggtgcccacctacaatgccccaggtgaaactgttcatctccaccgagtttaacatgaggacaacggtccaaagagcgtattagatagttttgggattctagaatttcacttttcttgagactgtattatcttagtcttgagaacgggacttgggcgaggtcgtgtctttatgtccggatgatgtgagtagaggttacattacggtgtattggggcgccaacccgaaaacagcaaagctaaccagatgtagtaattcacaggtccctatattactctaagatagattctattcagtgtcagccatctcgaccttttactatatggtgtaacggaacacctgattggaccacttttaaaagaccaacctatctatctgtaccgtcttctagatcctagcccgatccagcggtaatcccttcttctccgccttatcctgaaccagcgcagctaaaggatcaagaccaagcttgtaagatttagccggtcatctaaaacctatagctgacgtatgagacgattatagcaattcttaaggatagtccgtcttcctggcccggcacagaaataataaagttgcgctagtcaatatctaccttgtgaagtagcagttttcgtctgttaagctactattagaaaccaggagtcaattctcttatcctagctttctggatctactgaggtactactattaggaggattaggcatttttagtctgggagtcagtagagcttttagtatgtcatatcctcgtatcgagatatactatcactaagggtaaggttgccgcaactattcggccggtaagtgctagtcttagcagccgatataagaaagtggtgcttataccgtaaccttataggtcctcgaaggaattcaatatctacgcggccgcgggagagccctcgccgccttgagtaccaataccatattgctcacggagtccggtggagtcaggatcggtaagtagggaacctaagcgcacctggtgggccagataagtatagtttactcacggtgattaatgttatagtagaagtggagcacaggctacagctaccaaatcgatacagccgagatagacgcgctaactctgaagctattcgctttagctaaggttataaaaaggctgattataaagaatcctccacactaactatcacactcttataacttggttcgcgaaccttaactcgaaacacgcccgtccatatttggaattgtattcgatccatgatttccaagaatagactttgtattttacatgacgcggatgggattctgccagatgtattttactcgagaatgccatacaatcgcagaattgtatagtaacggctgtatgtagatggacgatacaacagcattgaattgaaatggtatattcgagaatattcggctgtacagaatctagaagaatcaatgtacccataatgcgccaacccagtctttttggacaccagacaaaaaaatatagaaaaaaggaatcgtgagatcatgacatgctcttcggtgggaaagtagacgcaagtttgtttccgtcttttgtgaaccgcatgaacttaatcgcgctgagacccgaccagtgtccattccagttcttcattgcggtcattgcatattgatcgcctatatcaggcatccacagtccggtctcgaactctcgcgcctcggtttgcacccgctgtttcaaggcctcttcgcgcttgctaggaggacgtcccttccggcgctctgactcgagctgtttgatttcctcggtatcacggtcaatgtacctggtttggattagtcttgggtttggtaatggaccatcggtggtgcgtacttggtgacaaactcggaaatctcttcggtcgaaagggcctcagtaagttcttggatagcctcatggatgtaatcaattcggtccactaatcgagtcagccgggtggccttcaattgaaatgggcagttgtctcacagtatggctgtcttgcacggttcacagtggcgttatggcgggacaatcgatcatcgcgagcgccagctttgcgaagtcggtgggcatcccgactgttctcatgaagcacattagtagaggtgcgcttcttagaaatctgcttgtgcacctttgtcaaggtaacaggcatggttgcgggctgatgacaagaattactccaaacactccgccgtggatttcgacgataattttcgtggatgcaacggcataattaagcggtgaaccccaaaatcaccgccttccccactcgaggaaagcgcgtctgcgcgtcgagataggcattccaggagttatctactccttcaatcctttaaccgggatttgttttggacctgctattgcattcaacattcattagtcttctgccggtgaaaatctcaacctatgttaccacttattgcttgaatacgaggacccgcctgtccctcgaacggtgtccacaatgggcatcaaaggtatgttaactttgtgactgtctaggggagatgaatggcgattctaacacagacaaataggactgcacgggcttctcaagtccattcagaaaccatgtcacatcaagaatttcaatgggcaaacgcttggagtcgatgcatatggatggctgcatcgagggactgttgcttgttcagtggatttggtcctggacaatccgacgagaaagtatgtctttcgatatcttatcccatgaactgttgactgacaattccatcttatgacagacacattgatttcgtcctcaaccgagtccgcatgcttcttttttttggagtgaaaccctacctcgtttttgatggcgacaatctgcccagcaaggcaggcactgaacaggatcgctacagacggcgccaggaaagcaaatgccttggactggaactacaacgaaaaggaagaatggcggaagcttaccaagagttccaaaaggccgtcgacgtgacaccctatatggctcgccagttaattgaggaactgaagcaaatgaatgtgcagtatgtggtggccccgtacgaggcagatgcccagttggtgtacttggagcaacagggtgacattcatggaatcatatccgaggactcggatttgcttgtttttggagccaagcgattaatttccaaattggatcaacacggcgaatgcattgagatcaaccgcgccgattttactgcgtgtcgcgaagtcagtttggttggcttcagtgatccagacttcagaaacatgtgcattttgagcggttgcgattacttggcaaatatccctaagctggggctgaagactgcctaccggattattcgcaagcatcggagcgttgagaaagccctgcgcatgctccagtttgagggtaatttccgggtcccagccgactaccttgccaacttcaaacaagccgagttgaccttcctttaccaacgggtcttctgccgcaaagctgaaaagctagtgactttgacaccacccgataaggataccaatttggctgcgcttccatatatcggcgccgatatggagccggaaattgccatcggagtttctcgtggcgatttggatccaactaccaaggaaccaattaccctgaagccactggccgcaggtagatggtcccttggtattaatcgccgccagacattgggtacttcctctgagttgaagccaaagaagtccatcaattcgttcttcactcccaagaggacaccgctggccgagctagaccctaacagcctaactccgtctccaagccagcagcgactcctagagcgaaatgcgagcaacagctggcaggccaatgcagcgcccttccgctccaactcggtcaggtccacgcctctcagggcgttttctgaccaaggtctcagccctatggttcggagtgtggaacgctcctcttttctggcccaaagtgcaagatcgtcggccttgcagtgcacaaagaggcagaggctgtgctctgaggccgagggggattctctgcctgcttgtccccctgctcgcagtcggttctttgctcaagccagccctagtcctcaagatctctcccggtctaaacggtcacgcaaatcagtgatcggtgtcttttctgatgaaattgcagaagacataatgtgcagcattcctgatcccagtactacccctgggcctgccgagtctacaactgagagaaaccttgagatatccgacaagcccagtgaagttgataccccttctaaacctacctccgacaaagtccttgtgacagagaacctcgatgtatctcagaatagtcctagggataacacaccgaactccccaggttttagtctggctcttgactatcacgttgaccggcaaaactcgaatttactctccaagtttacttttcaagctgggcaaaagcccgaaacaaccgcagctagctcgaccatgactaagattcctgcggctcagacttcccatagaccttcaacgccctcgacccccagaagcccagctgcgattgcacggagcaacgtcttccatcgacgcctgacgccgctccagcggatgggacagtccgctctcagtcgatctcacagcatcaatattcctactaaactccgggatgccgaagctgttgaacctcggactgaagcttcatctcctatcgtgcataaggtgtcctctctcgcaggaatccaaggcagcgaagatctcattgtcccagacagtgaggatgaagaggacgaggatgagcccagcacagggtactcaaccactcttgatctgaaacgctttgcttttgccgcgaattaggctgcatctctatctgattacggagcatagaacaggaacatcggattttggtatccggggtagcattggaccactgatttggtaggttccactttggcgcgtaacttgtgttaatacggagtactttggttgggtttattgtttgacatagcgttggttagagcatactcgaaaacctgaaacattgaaacgtgcccgatcgctagcttgtaggtactccgtgcatcgaagtgcatcatgtagacggcccaatattgaagaggctgggtgaatcgcgtggcttgtggatgtggggcgaaggttatcgagatctgcactagtccagatcgggactagagcggccctggctttcccgtgtccggcggcagaaatacccacacggaaggcggtctacgctggttaccggggaagcgggcgagtaaacaagggcgttggcccagcctcccatattttcctatacaactttgcctcatccccagcctccagagagattcagagaatcggtcaattagcctgacgttgagttttgtgccatttacgatcccttctttccatcccttccattctttctacacattctatctctcccatatacttcccacctgtactacacacaggcgtcaagtcatatcataatatctgacccatctggataatccactctaggtgcaaaccggattccacaataatatctaacatcctggatattgttctaagtattctcggcattggatacgtcaacgatctttatcctactctccgcattcttcatctacattccattccaacgatctcgatctcgattcaacgctcatcgcaaacacacgaaccaacaacaagtgtgccactggtgtacaattcagttcggtgatcgcattcaattcaggcaactccttctcggagacccgagaagcgagtcaacaacaaattgaaggagtctgaccccgacgtggtcttaattgcacacaatggctgctggctttgctcaaagatgggcccgtaagtgacgacatgtcgaaagagagcaaacaatggcattgttactaattctccatacagggttcattccaatgatcgggtaccaccacgtgttgatgattattatcgcagttgctattatcatattatgtgagtgcttgtccattgcgccctctactggaaagctgctaatataatgcagcacttctgttggccggctgctcttcatcatctccacagatgcccaccatcttccttatctccctatactacgaaaagtataaccctattagagatctctcacaagtcgacccaggggttgtcactgccctctccaatattgtcggcggtgcagagttggaagtccgagtgggatactttggtatctgtattcagcctgataagggttctttcatctgcaatgccaatgcgacggcgctggctgagattgtcacggtggatcaagatccactaaatctgatctgggttgcttcaacgttcaaagatgccgttgtgtttccgtatctcctgtgagtaactgtaattccttaacgtcagacaaaactaattctcgtgcaggattgttgctgtcattctcgcattcttttgtttcatccttctggcgacattccctggctggcacgaggaggttgacgaaactggatccgagcgcgaagtcaagccttttccctctcgccccgtctcccaggctgcgctagccctcattttcgtttcctcggtattcgttcttgtgtccgtattatggcagcacacggcatctgtcgctgccagtacgatagcccaagacatgggtaatggaagtgtgaaaagcggcgtcggctcttctgcaatggtgcttggctggtttggctttgtcctactggtgatagtcactgttggtttgctggtcatgatcttaagtataagtctgattcgcaaactgaccgatgaggaataatcaaaccatcctcaacgccgacgcaaaaaacacttgcgctctttgcttttctttttttttcgcgacttgcttacacctacttcttctttgcctacgacataccctacccttataacgggacgacacaaatggaaatgaataatacctacgagcacacgacactggctcgcaattcacggatggatgggaacggaacacacgacacttgggacattatgatttccccaaggggaatttgggacttgcacacttggattttacgaacatatttgaggacatggatcctcgcaggctttttattcttgggatctgactgagatatttttgtcgtttcatctcaagaccatatttggcagctctgccgatctgccgatctttcaggatagaatgaatggaatgcgattgagtcacattttgtacagatctcttttgcttgagtggaattctgttttatgttcagcacacagcgtttttttttttttttttgctcttttgatcggatcatgtataccacagcctcttgttcattccacgctgtgttcactttttcacttctcacacaggactgccaatgctagattagtccttacgacacaatgtcaaaaatgataccaaagtcaagccttcatttataactcaatctctccaataacctacaataagtgacattggatatcaaaagccccttcccattagtttatatctacaggagtgttgaatgttcttggctaccatttgctacaagactgtgtttggatatcatctataacatcaggaactatgaatatattcaatgtctgattatcatctgcttctagaaagttgtgcctcaaaaactcgtcaaagaggtgccagctgttaaagagcactcccagtaaccggacgctggtgacaagcaggctttcctcgtcaatgctacctgcaggacacaatgcaggcaaaacccatcaacaatgaagaaaggatataaagcggaatcagtatatatatagacgtcaatcattgcatgatccctcgccatcaatttgcgtgaactccgacaaatggcagctcagagctcatcactaaagcctatttccggatatactagcctgccgccaattctgacagctgcagcagcagaagaagcgtcctgcagaacgttaggcgaacaagtcgtcatgagtccctcatgaacctagttaaagccctaacaatcaacgttccgagtctggactcccgatgaacttcaccccacaggtactgtgtctttggcgtatatagcccactgcgtatggatttcattcgacaacggcgaaggtttcacggatattttatccttcaagataaccattcggtgggatgtttttggtcgtaaccaaatgaatctcaccaaatggctatctcgagggctgcaatatccgtgagacctgcctcattgtagagtgagagccgtaccctgtgggagccaaatggtttgcgggcggaagcatcgagaatccagactcggaacgttgattgtgagagttttcaggaggttgatcagcgactcataacgacttgtttgcctaccgttctgccggaccattcttcagctgctacagctgtcagattggcgataggctagtatacccggaaatagggtttagtgctgagctctgagctgccacttgccgcaccatctcacgctgctgatgcatgggatagagtcgatcgattctcttcatcagacactttcagccactagccaattagatttggaggtgatcgattaaatacctggatgagacagcaggtaagcaggtaatcggcctttggtagagccacgatgtgctcaggtgtaagatggaagtaccagagcattgccttggtcggtgcgggaatgatctcttggaagatttcaaggatctgcaggtgaacagttccaaattgatccgtaaattcacgacataaccatacctcctcatttttcctcattttccgggcatgaacttcacgaattcctgtcgcatctatcaattcggacagctccgactcgtcgtcaggattgacgatgggtacttggggaaaaagtaattcaaggctatgtaaacgaaagattgaggttgattccgttgtccttatcgtcgccgttatggagaaaatgatctgcggagcggacgatgagtcgtccgtgggatagatatatatgtatcaaaagacatcattctgcacacctgctcaagcttcgatgagaagggaaagtgggacgaagccatgggttgaattgagcaagctggctgagagggagagagagagggagaaaggaagatcaaatagagcaaaattcctatctgcccccaggcagcaaggctgcctcaacaaaccaaattgtcttaagatagaagttgcggtgagaaaagtggttgccaaccgtctcacatattctaatattgactgaccactgcttcacctagaaaagagaaagaaagaaagaccagccttcagaccacttccatcacatcccacaaggagatatagttcgtacagcgggaaatgacaagctgcacaaccagcaattcattgacgaactagcactcaggatcctggcactcctggatggccaggaactgaggcagtttcgggaatttctctagggtataggtaacattccgagaactcgctttgttcccacgggaccgaacgtagtaggtttcactaaagtgacggaggaatttattggccaattcctggttctgcttgttgtaggaagcattcatgcgagacatctgagtctgttgtaaaatggtgtagtcggtggcagctcccgcgtagtcctcgatgagaaggaagtgctcaatctcggtatgagcaggacgtggcgtcaacgatttcattggaacaaatttattccttcctacagtcactgcagcagttggcgcagtaatccagagtgtagtttcgaacgccggtgtagttggtcggttctcactaagagaggaagtaagtaggctcgagatcgcatcactgctgacaacgcctgtgaaactgtcgctcacgctattaataactaccgagaacatgcaatctggcaatggccttgaaggctcgattccaccgactggggtgtcttcccacgtcatgactgtcttctgcgccatggctttgaagattataataccgttctggcagacttccatgctaggtgctcgaagtactgataaccgaactctagcatcgaccatgcgacaggaaactagtttgaaccaattctgggatggccttgaagttggcatatggatgcaatagactacaagtgttcaatggaagccgactttggataatagaaagttacagataatgctgaagaccagcccgcgggtcagccttccgaaactgcggctttgaagactccaaatacaggttaaatgatcaatagtccatggagtaaccccctctgcctgcacctccgccaccattgtgtccattcttgctgtcgtgttgcccgtcgtgtccagtgctatgatcatctagcgacctatactggtagtattcacctcgaccacgacctcggccgcgacctcggttgttgttaccgcgcccgcgtccgacacctcggccacgtccacgatgagctcctcttcctcgcggactatcatcgtattggtgacgtccatcacctccgccgcgctgggaggagtgatagttgccgcggctataagatgggccatcagagccggtgttttgattgggccagacgacatttccgtcgtccggctggaagcgtctcttttgactcctgttcaagggttgctctccttgacgatactctccgctgtcctcgactcgtaggacaaccttctcgccgaccacagtctcaaaggtcatggctttgtcagccggaatggggtgccagttttggatcttccctgcatcgatgaggcgagcacctttgcgaacagccagtactacaattggcagtgggttctccgtgtgataaggctccgtcgccgggataggtgccacgcgggctgcccatatcttgttgtccagatttccggttccggtaacctgccactttagtttcttacccaggcctccaaccttgtccaggattgaacgaggtgctgggcgtggggtgattaggatgctgttagccatgtacttcaggtcatttgattcaccaagccctggggggagcagtggagccagcaacttctgcgtcatgctgtttgacacctctggagaaaccagataacctgtgtagaagacgacacgcttgatatacaaccgcccagagcggcttttggttacgttcaaagcagggttccgcagtgtgaggttgtgggaattgaccatgcgctgcacctcagaagcctcagttacggggtcaaggtatgtgctgccctcggttacctggatgacttcagcaaggataggcatccgtgcagtagagggtccattttggaggtctctgttcagacactcaaagaagtctcggaagcctttcacactagcagaaggttaatacattgatatgctcggattctccaactcggttgccacaggacttactgtctgacacggtcctcgtagacgcggatttccgcagcctgctcgtaagtgaaaacaagatcctcgagaaagttttgtttgaagttcattgtggtcgcaaaccgttgaccatgtggaccaacttcgggtttgagaccaattaggtcgaattcaagattttgactagcgaccatccgcttgatgatatctgagaagccggcctcacttcgaccggtcagcaacaccgtgagcgcatctttctgctccatgctattcctaaccaaactaagctttaaaaagtcagttcaaaacacccgcaacatgtaatatgtgatagaaggcacacaatttgctcattccaccagccttcccatttgcggggctcttctatctccatgccttttcctgtagcggcgagaatgttggggtcgtgccaccatcctccagttgcgaaactatcattggtttgaaggaagccgactgaggagccatgccataattgtgggtttggtagaggacttagaaatactgaaagtgcgaatgttagaatcgagtgtcagaccatcctaagctttgcatatgctcacaggtgttgtcgaaatcgtagacgtgaattgcgcgaatttgagaaacagctggaaaatatgaaagccgttagaattataacaggagagtggaccatagtgagatcgaacctggcagctccttgttcacaatagaccagcgtcgtagcgaggtgatcgtatgcgggcgattaatcccgcttccagtgctgtacgacatattggcagcagagccaaatcgtgcaaggttctctgaaacgactgctttggcagatcgcattctatcaggttaaggggagatatgtcgttagcgcatagttgggagagaaagagggttgaagtcgcaaaaacgagcaggcgcggtgacggagctcccgagaaatcggttttgccgccgggaacgcgataaacgggacaaacgtgacttcgagaattcaacacctgcaacccacccctagcatgtcgcctgtatggatgatgtcgatttgcgacaggaaatcctccagcagactcttaaagaggtagctggtgaggagaaagaggcggcaaatccttgtgttatttgcctagacactatcaccgagccctgtgtggcacagccatgccaccatgtcaacttcgacttcctctgccttgttagttggatcgaacagcaacctaaatgcccgctatgtaagaaaccagtgggcaaaataccgctgactagacctgactgacaatccaacaggtaaagccgagttgacagcggtgcaatacgaactcaacgccacacaaggtccgaagctatacaaggtcccgtctccgagcgcaacattcccgacagttccagttactagtcgatcacgtcctggcaatcgctacggcccacggggagggcgacgtcctccacccccgccgcgaccacagtcagatgacccgctcgagcgccggcgcaatgtctatcgcaaccgaacatactccatgcgagtcgggtccaatcggttatctcagtatcgagaattgacaccagacctcttcgctcgtgacgaggagctcgtctcgcgtgctcggaaatggattcgccgcgaactacgagtcttctccttcctgaatccggaaccggagcatgaagagcggatatctcaccaagtttcgcgtcctggacctcagcggctggagaatcgcagggcgaataatgccgagttcctgctggaatatgtcatcgctatcttgcgcacggtcgatctcaaaggcagtgctggacaagcggaggagctgttgcgtgatttcatcggccgcgagaatgcatgtctgttcctccacgaattgcaggcgtggctgagaagtccatataattccttggaggactgggatcgtcatgttcagtactcgaatactccgcgaagtgtgtctgacggaggaaatagggatggtcgctcgggtcatagaccgactcctgtgaacaatcggagtagaccacagaggtcccgaagaccatataggtccaggtctcaagatgcgattgatcgctccaggcggctgcagcaagctcaacagcgatataatccatattagatgtgcaactagatatgaaggtgttacatccatattgttaataattgtctagggaaataatcaatctctggttcccacgttaaaccgtttcagactttgtgcttttcatttagaaataatattttcctcccatgcaactctctctttgcgacttcgaagtcgatcaagtaaaatcaagtactgtacctaaatctgggggatgaacataatcccggattatgaactggtactattattcaattgcggtatcgattatttcagtgtttagtacgtagttctcagatctggacaggcagggtagagggctcgggggtattgatgcgctatgaatatctgagatatgagatgctatgtagttatgctgaatatgaatgttttaatgtagtcgtctctccatccacgaatgaagaacaactagggctgaccgattcttatttccggcggaaacgccctctaccccgagaggaacctcctctgttgatgcttattgatcgatagttcgcatgagcttcggctttgatcttccgaggacgaggtttctttgcttcgacagtctcagcaggcttcttcggaggtttccccatgggttcttgttcctgtggcttcacggaagaggatgaaacagcttccttgattctctccgagaaactcttcggtctggcaacaggctttggctgtcctgcgaattcagggtcatcgttcgagtcggaatcaaattcggcctcggtatcaagctcgggctccgacatggtatgaagggaagcggcctcatccgcccgttcaatgtcactcgggacatcatcccagccgtcactagccgcaggtggctgttgcgtctccggaactgctacaacatcatcttcatgttccgagtcctcattcgcaagagctgggtttggtttgggtttgggtttcggctgatgaataaccggcctcataatcactcgtcgcgtcgtccgtttctggcccttcttcttgtatttccggttcacatctggtccttgactatcctcaacctggatcttggcagcttcttccgcctctgcctcttcctccatctcgcgcatcacatcccagtcgtcatccatacgctcctcctccatatcccgcagtccttggactaaatgcgttagccccttgctggcaaatctttgcggcttacgcgagacaataggactgagtcctggaccatcatgctttgcactaagtggaggatatcgaccagagttggaccgacggaggaaagatggtgtcccagattgcgcttcctggggtgatatttcatgtgctgggtttagcagatttgtgctctgtgaatctgcattatcggtcgcttccaccatggcggcataacgcattgtcgtcggtgttgcgaatagatttgcaagatagaactgcttggtctcagatgcaggggttcgcgcaagcctgggcgtctcttgctgaggctcttcttccggggcctcggggattgtgcttacgggctttcgtttggagggtgtgcggaatgcggcagctaggttattcgttcgccttgtggcggaaggcgttccaccactcccgccagattcagatagcatgtcgaacaggcccaatgtctttccgtcacgctgaggcgtaggcccaattgcggcctttaatggcgatggtgctggtagtccttgccggtgtgtactgggactaaagagtctgcgaagagtcgacggcgagtcatacggatccagttgtgcagggtggtgcttggtacgattgttggatggagtcgcaaagagccctctggacgatttgcggggtgtgacttggagagatgtactatcctgaccggggggagatgcatgtttccgctttttcgagtggctttcatatccctcctgtcgactgttttcgcgccggcttagagatgcttcaagtgccttgagacgactgtattccttgtatttagcagctagtgcatcgaaacgtttttccaattagtgatttatttttttagacattatgcaacacgagattatcgacctaccgatatccgcgttttgtttgatatcatcgcgtccagctttgcggcccctattggctgacgagaaggctttctcccacgttttcaattcggcgcgaactttgacagcttgtgcaccgacctcagcactggaagtcagagcgttgtcggccattattgcattgtatgtggtatcagacaacctagaagaaaagcagtccgtaaatccatcgatgcgcgtcacgcgacgcgaactgattaacgacaagattggtaggcggtctaattctgcaattatcaatcatttcaatcaacaccacggagtaactactccttggaaaggatatgttcatcggcttaatttgcccaaggtaataaaatggtggctttctagggctatgtacttttacctaggaaaaggaatgccgaggatcatccatcataagtggacttactgccaatcgtacattgtagcgcattccctcccagctacccgtacgaccactcggggggaggtacgtagatagtcactactggcaatgatacagcgaattggaagtatttaagggctttgagatctccagcggccaatgtcttatctctaagtgcatatctaggctcatacgtgtggattgatacgtagttaggttttgtgttgttggtgtctttttctaactgaccaaaagcttgtcgtaacagcactttgctctagacgagacacagctctggcatagtagctttctaatatcgcatttcgcccggcgttgtttgcaaggatgatacggtccttgaactatacgctcacatttcgggggcatagttgtacggttgtcattgtggtacaacacgaaggaagtgaagaaaaagtgggagtcatcgtactaggaacctgggaaggccttggtcaagataaccgaagcggagacgcgaagaacggcacctagcgaaaattgacggatgttccaactgctccacatgcgaaggactaaagaagtgaagccatccctcctttcgtagtcgcaacagaaatattgggattatggagcaatgaccccgcggaaaactgttacctcatcttcatccccgacaagcgagccataccaaataccaaacgccgctccactgccgactccacaaactagggaccccatgcgaccccattctccgtctccatctgcatctccacgttaaagcaaggaagaagatccacagctccgccggcaccactgatctcttccatccaaacctgaggcatgtacgaagggcatatcatcgcgaggctcatagtatcgtgctcaaagattgtgagcatgtcactgcccgtatcatttagcatgctgataccaccttccaatagcggaagacggatacgcgctttgagctaaagccaaaaccgcatttagaggatatttcaaaaaaaagggaaagggattagtgtccatgaatgtaagggccatgtccatagctggccttctgtacacattgctgcgaggtacggttcccacgctatgttatattagcgataacagaaaagataatagagattagatcaagcttacctcgcagaaatacggcttcttggccgcaatacactcttcttggctggcaacacgcccgtcgaccacgaatacctcgtcgttcaccgtgattgttccgttttgataaagctcaatcacggtggcgacattcttcgcttgacttgggcggtagagagggtcattcggatcaagcacgcgcgcaagagcggcagctctctgctcgttggtgggtggagggcgaggcaagcggggctgctcccagaattcagcgggaggttgtttctcggaattctgattggattcttcgggggttggcgacattttggattctgtaaaatggaagagaagaagcaaaggagaaggtcttactgagttgacgaaatggttagattcaaaccgcctaccaattgtaggtcgctcgttacgcatatgacggtttccgagtagcacggcgaggagcaaacatcgttcgataagagaatgaactgcctggcttcagtcggggagcagcttcgagattttaattataatcacacgtcattttcgcttctgttggtcgcagtccttctgctctattttctagacagctatatcgaatgtcgtcatcaatctgcgtccacggcacctctccccgagcagtgcctgttcgaggataattcactcggtactagattataagaagccattcgtaccgtagcgactccagaagaaggatattagagtttaacagagtgaaagttgccttgaagcatgctccggataaaaaaaacgatctgatttgatcactgtggttcctggtgcaatgcaagagacagaaaaagagcgaaaaggatttgatacataaaactgaccattcaactctcgcccaaagagccctgtcttcctcctatttccctcgctatgaatgcattaaagatcgccatttgaatcaaagttaaacctagcaccattatcttcccattaccaactcgtcaaccctttcacccgatcaaacccacccctcaactgcgactcaggatgaacaaccttcccctgaagaatagtgtacttaacaatgccctcgcaatgctcaggccgcacacgcgcaagccaaatcatctgctggtccttcttgcgatagatcaaaacattcgcagagaacttgtgcccgccgacatgcgatacgaagaagatgcccaccccgccgacccgggagtcatccggatcccggtcgagtcccagcggacggagttgtcgctccagctcgcgcttgatgagtggcgctgtgataccacagcgcgcatctcggcgtccgtgcgagcacagtaataccacgtagtcgagttcacaggctcgagcgttcattccattcgcgggagagccattttgctggtcgctggggtgatcgatgtatctggctatcagatctgggacgtccttttgcgtgacggagtcgacgtatgtgaatgacgggaggattagtactgtggtggcttgggtgggactttcgtctgtagttggctgttctggaggggtgagatttgatgctgacaccttgatacgctggatcgggtgttagtggtggtaggctaaattttgattataaagcttacaccgtggtctgattttgccccgtcgaatgcttccatcaagcttcctgtcgtgttttcgacattcttctccttccagtcggattgccccgttgcgacgagaacatgggtctggaattctttgatatcgccataaagaggccttgaagtttcgactttgactttggacgggaacttcactgtgcagtcggcgcagtcatttaaacattcggggccgtccgttttgggatccactttaggaaagaggtagtcgttggtgcccgcgcggcccaaggaaagcaaggaacgcaacatggttggaggtctgataacgctgtgaaggcaaagttgaaaattgaaagtcaaggctatgagacgttttttgaagttcagggttgcctccagggctggaaatgtggagatagatatagagctcagtatctccgagagactatactccgtactccgagccgggacaaaaaacccgaaccccgagctaatagggttatctccagacttgggtctctggtgttaagtggagatcattatacgagacccttttttatctcggggatggctttttagtttagactgacggccacttaagagtccatgtatttgatctttatctggcatgtgaaaggaaccttgggagctcgcatcctgctaacttcagggcacttcattgatcccaatgaggtgtacagcccaatcttatcagatcactcaacatcaacctcaagtttagctacgttgaagaatgacacatactgctgtctgtgatatctatgagcattgatacttgtgcttcttgtatcgcatcgaaaatctcattaaagcaaggtgtaatagaacaactagctcccgatgggggcagcactggtgtaacgggcttgacgtcggcgtcggggtgtgttcaggccaggcccatagtcatcagatggaacaatagctgtgcatggagtactatgcaattactcgtacgagcaaggcgagaaaaccaagggaatcaagttccatgtacgcatacaacatataggggcagtgttgacatggatcgtggtggtgattatggctgttctcgtgattcaaaactagaccaacatcgggaatatcgcgtgtcgttggtgcccagagattgccaagggatgcagttgcccatccgcaatgcttgaatgctttccgataggccttcggggattttcagtcccgaaatgtcatggaaaggaagatacccatgtccattccatgcaagccaagtaaaccccttagtggggtctggattgttcacggaaccatcgggactggaatatgtgggccggggaaagtaaacccgatagacaacatgagggaaattgtgaaagaataagaaagaagaggaattgcttattctttcatcattcgagtgatgtataaagaaaagaagatgaagacaaacaaaacaaaaaaaaaagaaattgccacgcgacgtcggtcagactttccagattgggcggttccacgggcgcagagcgggaccacgtaagcgggagctggagcctattcccagaacttctcaaacatctcggacgtaaggtctttcctaagtataacccgagcctccaaggttatcttcaacaccgagtgcatggatgttcaagggaatgcccagcccgaacgcgtgcggaagcgtcgccgccgcacaatggcgtgcacgcagtgtcgcacgcgcaagttgcgatgcgatcgcgagtatcccacttgcagtcgctgtctaaaaagcagaacaccgaacaaatgcacatatgaagatggctttttatggcagcagcccaccaccgtcccgactaatgcatttgcctccgaccgagggtctgcggtacctatgcctagagatacaccagtcgacacaccccgggattcggggataccgatggtgtcaaaccggccggaacctttcccaattagtgaaccgttcccaactagtgaaccacctcgtctggcaagggctggcggtccaatgcatcacgagtaccatggtcttaccgggcatgcgcttgcgccgccctatcgaagtcgaccacacgacagagagcgaaaggactgctttttggaaactgttctcggtgtgcctaaggctgctgttaatcaggaaccttacctgaatacgggtcttttacagcgtcccaagcgcccagcgccggcgacggagcatgatatgcaaacaccgtcgcaggtcgacgatccgcacattgacgaagaagaggacccattgtcacctacggaccagcttgacctctctcctcgaatgatgatgagggggcgtgagaccaaaacgcggtttagcggatcgggtatctttgccagtctagtagcacaggtctgctctcaccatttagattctaattaccaaaatacggaggctgactattattagtttccggatataaagccatttgcagatgagatcaggctttctaccccaatcttcacgcaacttcagtcagacctaagaagggttaaacgcgggctattgaaacatatggtgctcaacaggcccttccccgatcctacgacggcttcgctgattaacttgctgccctcgcgtggtgtagtcgatgagcttgtcgggttgtatatcacttatatcgagtctactcaccgcattcttcatgttccatccttcctacgagagcttgaccaattttgggccatgttagacagcccggcatcaatatctgctgcctttacagttcaggtactgttggtccttgcctgtgcctggaaccttgcagattttgctagtctgcaatcaaaaagtgcgggcgaactcaagtgccagtgtgcagtggagtggacgttgcacgcaggacaatggatcgagaatcttcacacaaagcgcccggagatcacatcaatgcgactatcgattctgttgattttggcgcgcaacgcccacgggatgaaacgcagccaggcttggctcacaactagtacattggtcaagcaagcaatgatggcgggataccatcgcgatccaagccgatacacacgtatctctgcattcaacaaagagatgcggcggcgaatatggacaaccattgtagaactggacctgcaaattgctcttgaccgggggatgccaccgtcagtacaaagcttcgactacgatacggctccagggctgaacatttacgacgacgagatccatgaggacagtactgaagttcccggaagccggccattgaatgaaatcaccgactcctcgttccagtctgttctgagtcgctcactacctgtccgcctccaagcatgttccctcatgcactccccacgaattaactgtcgatatgaggatattcagcgtctggacggtgagctcaaccgccatctttctcgaattcctgcgtgggttgcagcagaccccagcgacatcattacacaaaacaagatcatactatggaaaggcttgattgagaccaaactttgccagtctctactgtctgtccacactccttttgccatcgaagcactacaagaaacactctttgctccctccgcgcgtactcgcatggatgccgcaaccagaatactgtcaacccagcgccggctacacgacatttcacgaacgctgtcgctatgtatgcttggtgaatggactatccaagcctacatttccatctgccaagtgctacacacaaccgaattcgatgcctgtaagttttttctattataataattgactattagaacccaacctgataatttgcagcccaaccctcatccatctcctctgccttcattctccacaatatacccggtatccccgaatcgctcctatcactcgttgaaacagccctgatcgccttggaagagcgctcccttttggtgaccaagggagccaaagactattatttcctctcaacgatcgtcggactagtcaaagcccgactttggcccgcacaggcaactatgtacaagcagcaggttgtcgagcgggtcctgtcatttgcgcagatcctcttctctcggcatatgaactgcgaccacctcggcgataaggggatgggcaatttcaaggacaaccaggtggctgcattcatggcggctccaacaatggtgcccgtcatgcaggccgaatttgatcccaatgggatgcacccgccactgcaatctggcggcatggtgagttccattctatccttggttctcgtcttcttttgtgctaactgggaatttctagccatctggcgatttcgatcctttcttggacatcttcgattgggaggatctgacaagtatgacatttccctgttgaatggaacagttcggccaagctttgcgtttttctgcggactgcacgatacacacttccactttctgcatttgctgtactcctaaaatttgtacaatagttgaacttgctcaggatacccatagtaaataccaagaaatatagttatgacaatgcggtcattcagatatcattgcgcaatcatgaatattgtgactcgatcgggtccaccatgagatcatgatcgaaggcatcaggattgacagcatgcagggggtgcagatcggacaagggaaagatcaatgccatgcttagcacggattcttatttgcacccttactgacaagtgccgagccttatatgtgactatttttctctagctttgacggttttgcgttgctttgccttgtaaagtgaagccttgtttgttactgatcgtcatgctacgtagctattgtggggatgatattcaataatcgactttgcagatcggggtccaaggcctacgaacaagctttgcagatcataccgcagtgccttttcaaggacaatacaaaacagcagaaatataagcaataggatgaactaaaaatgtaatctgatactgattcattctaacgaaagccaatcagaggaccctgtacctgatacttgcgggtctggtacctggcagtacctcagctcaaggcatagaatggctctggatcaggtacccccaggtaccattccaaatatagcggcgtctatgtaaaccccctaaaacacttggctttggcactaacttgaggctcgagggctgtgcttttttggatttcgcttttttccttgcgttgcatgtttatacggagtaccatgtgtatctctccgctttactccacccgttctcttccccttttccctgcattgactggacattaatcagagagtcatgggtatcacgatctaataaccccaattccccggccagccaggccaatctctttcataaaatccctgcatccacaacggggatataatccaatgtacataatcccgacgatgcatcacctcccactactcttatcaataatcatcgcggtcgcagctccactagcaggggccatcccagcccaagccgggacacacagtgcgacacaagtataccaaacaaccgacaaatacccactcgcaaacccaggcaacatccccgcccacgacccaaacatcatcctacacgatgagcactactacctattcaaaggcgggatcaacatcccaattttcaaatccgccaatatatccgggccatgggaaaagctcggcacagtcctagccggcgacagcataatccgcaaaggcaaccgggcacgaccctgggcgcccacaacaattgaaagaaacggcacattctactgctactacacgctgagcgcgcgagggtcccgcaacagcgcgattggcgtcgcgacgacaactgccctcgatggcagtccctggactgaccacggcgtcgtcattaacacgggcacgggtgctgggtcgggggtgtggccgtacacgatcacgaatgccatcgatgcgtctgtgattgttgaccgggactctggccaggcgtatctcaactacggaagcttctggcgtgatatatggcaggtcccgctggcggatgatctgctttctgtgaaagatgctgataagccggatgcggtgcagttgacatttctcccacgtgttaagcctaagcctgaggaggggtcgtggatgagttttcggaatgggttctattatgtttggtttagtcatgggaagtgctgtaacttccagagtggtttccctgcgcgtgggaaggagtatagtattcgggttgggaggtcgaagagtgtgcgtgggcctttcgaggataaggatgggaggtctttgctcgatgggggtggcacggtggtttatggttctaatcatggggttgtgtatgcgcctggtggcttgggaatcttggctgggaataatgacgtgtcggatattctctactatcattatttgaatacgtcgattggctttgagcatgcggtgagttgttcttgtctttgtcgtcgggttgggatttgaactgatatttctcgttctcccagcaagctcagctcggctggaactatctggactacgaggatgggtggccggtgcctaccgaaggcaaagatgctaccacggccaatgtcgccttcggttatggacctcctagctggggttacctagcaagtgttttgggtaagaggataatctcctattttatgtgtgttgtatgctgatactgagtttaggtgtatggctgtgcatggggccatagtagtggtcatgtcttgtttcttaaattccctcacgttcctttcttcgcaattttcagcgattgttctatatagcgtttttattccgacattatgcctatgaatcgatctagcgagcatttcattcaatatatgtcattggaatatcaagccatggcgctaaacccaatccatgccctaacctaatcttataccatcaaacttattcccaaccaccatccacactaacaatctgtccagtcgtatacgacgaagcatcactgagcagaaagacaaccgtttgagcaacctcctcgcccgtcccaatgcgcgggatactagctggtggcatactaatcccaccctgaatctccttcgccatgtccagcaaaggcgtctgaatagaaccactaccacaaaacccaattagcaaaacccaccgaaaaacactcttccccaaatactcacggcgcaacagcattaaccctaatacccggccccacctccttagaaaccgactttgtcaacccagaaacagcatgcttcgtagtcgaataagcagcatgcaacgcaaaccccttaatcccctgaatactcgacgcattaacaatactgcccttccccccaggcgcagtcgccgtaatcgcccgcagctgcgcgcgcagacagtacatcaacccggtgacattaacccgcatcaacatatcccactcggcgtcgtcctggtcgacgaatttgctagtgccgtggttcttgccgatcgtgccggccatgttggctgcgccgtccagtcggccgaagtgcgagactgtgctggcgatccagtcttgtacggcgcttgcgttgctgatgtctaattccgttgtggtgattgtcgacgctgtggaggaattggagtcggtttcgattatttgtcgtgctgctgagaggatttgcgagcttaggtcggcgagggcgaggagagctccttgcttgtgtagttggcgtgctacggctaggccgattccgctgagcccggttatggcgtatactttgcctttgacggagtccattgcggtggggtttttgatatgtttggtctgggaatgagagatttatgaacttggagagtagctgtgttacttgaatgattgcggggatcggagattctccgtggctaatatgtatgcatgtccgggtatattcgagctgcatacaacatagataataggctaaatgatgtgtttagaaagttgaatacccgtctgccccacgagatccattgtataaaatcgagaggatatacataccttacgaaagcaagcatagagtttgcataagatgatgataatagccttggcttattgatttgatcaatgcatcagctgtgtattctattgacctaagccatattaattgaatatatatccgcgacttgtcttgcgtatatcagctttccagatttacatcaatatctccacatctaaccaactccaaaatcacaaatgggtatctcaaaatgcaaaatcaacactccaatctcaaataaacatccccgacagaagcattgtcccaaccaccaaagccacccatcccaccggccgcctcacagccccagaattcttctccgttttggtcccatatacaaccccatgagcattcaagcagtacataactttcttcgcctcggccgaagaaggcacatcacagatcgccgtacaaggatcgggatcctcatatatccacaccccattcgggcagcaggactgcagaacagctttcatatccctgtccggggctttcgtctggtacagcggcacctgattataatattcgatattggcggggatggcgggcaccgcgtcgcgcaagtcgtagcactcggccggctgtgtgaatcgtgtgacgttggagtcgctcattatggggggtgtcatggtgttttcccttgccgggtgatccggtgcgaatgctttcgcgacgcgacgcgaaacagtattttagctgttatttatggcggggatgtgcagtgctgttgatcgcggttcgtggagagagagggaggcgtggttcgacaatgcagagaggcgggatggtcgggggagtagagagaaaggacattcggggattgttcagagcatatggaactagtaatgtcctccaggcctctctttttttactcctgagcacgggggggcaaagcgccaagcccgcattcccggacgttggagatatttgcctgacaagtggagatgcgggcctgagtattcagcttgcagcgaactcctttttgggcatcaatctaggtaatgctgttagagtgagacaaaaaggggaagtgggaactgatatttcgatttctccttgctgggctatttacttggtgagctatattgcatgtctttctatatacggactagtacggaggacttctgctccttacggtcagatttacaaccgagcggtttcattggctcgcttccacattttcttcctacgctcatgtccttcgttgaaatcagacagccatttctgatcgaacggaggtaggcgccgccctgcaccaccacgaggttccccggctagatggcggaggctctcgaagtagggctcgaagtcggggttgatgactgtgaaggcggggccatcgctcttctctgcgatgcggtcggtttcccatttttcttgctcggcgatcgagggtagggttatcttgccggctaaaaagcgtgcggcagcaacagcctgccattcgaagactttgaaggtcaacccagcaccaacctgggattattgttagcgtttgatccggggaaaatttatcgacttgatagacttacagcgcctacaaaaacaagcgttggatcatgtctgtaaaagacatgttggtagagatccggcacacgattgttccgcgtggcaacctgaggcaagaaaggcagagtccagctgaagccagttccaaaaatcaaatagtcgacgttagtctcaaaggtgccgtcttcgaaatgcacggtccgttcgccttggtcattactcgtaatgtgtgagatgggcgggcgacgctgaatcttcggatgctggaaggcgagatctccgaaataggcgttgtaacgaccacgaaccacagcaatgactggtgtctgagcactatcaatcaggctgactgcagtatcagcagcagaaacagacgctccgacggtgatgactttctgcgatgtgtaagcaggtggtagaatgacatggcaggaactccatttacctttccccgatacttctcaggcccacggtaatgcttcgtatgttgaacactgccaggatacctcgcagcaaactccttcaacccaggaatcacagggataaacggcactgcgtaatggcccgaagccaccacaactgcatcatactcctcagaccaccagtaatccgacgtgacaccgtccagcacttccgtcctgcggaatgtaagcacccatttcttgctgctgggatctttgatggcgcgttcaacagtagtattatactgaacaagatcttggtacccctttcggttaaacaagtcctcaatatacttccggatgaccgaatggtgccggaaaggcgtgtctgcgccatggcgctcgatcgaccactgggatcgaactgtaggaatctcctcttgcgagaacgacatggctcccgcgttaacattagtctccagcgtcgggtagacgggggagtccgtgaagcggtcctgggaaactacaggcgtccggcacgggaggtgctcgggaattttgagaggcgcatctgctgttcgcgcagctagaccgtcaaagtcgaactgctgtgacggttcgtcatctctcgatacccttttatttattagcgggaatcgctgaagatagtagagtaacatagtgacataccagcatccgccggctttctcttgtctctcgaatacatggatgacatcgaatgctttctcttgtgctagtgcatcgactgtaatggcgccagctgggccggccccgatgatggctacgctcttgatctgcggcatggtgtgatatttatgtttggtgagagattgggcgtgtagccgctctttatcatccaatgccgtctcggccgagcacccgaaaaggcaatatctggggtgcaaatcgttcgactctatcacgccatttgactgtgttttagcgcaaagttggcattggcggccaatgagggctctggatatcgtatataggatagccgaggtcagacttacgatatgtaaatgagaaccgctttcatttaatacattaatgtcgaattgaacatgctgaatcactcacattacaagtttttcatctttgtccatcggcctggcatttcatccgttgatctgattggctgtcggcattgaagttttaaggtcacgtgaggacatcccgggattcttcaggaactttattctgattggctgggagtttacgccttggaatttaggccataaagtcatacttctgtgtttgtttttctagttcggacgttgaacgggcattatgatttgcttcaataacaagagataatgcaatttgtaaatgattatacaaggggatcgaagcccagggtgcaaaagccgctaaactaagtaaacacatcggtagcataccgctccttcgtccgcaaattatcaaagaacttctcagcagcctcatcctccccaagctcagcaccaggcggagtctctcccttggccttcagctcggcgtgcacagcacgacgcctctcgagatacatatccttgcaagcctggcggataccagcaccaaccccagtgctaccgcacacatagattctcgcgccttcttcaaacagcttcaccagctcttcacggtcctcgagcatgacatcctggacatgctgtcccttgcttccatcggcaggacgactgtacgcccagcggacatcgacagcgcccagcgcagcccactcggcaagttcagcagcgtggatatcgtccaggccctgggtgcggcagccgatgtacagcactgccttggcgggcttcacagccacgttctcatgcagctcatccgagtcaggcgagctgcgacggccgcggatcttctccgcgcggtccatgacgaatccgcggaacggtgcgagcccgctgccagcgcaggccatgatcatcggtgtttcgagatcaatcggcggcttgaagccggagtgcgaggggcggacggtgatgtgtgcgcgttcgccggcttggagctcggaaaggtagtttgatgcgacgcctaggtagaggttttcgttgctttctggggtggggttggcgagtgctggagcgctgaggacgctgaaggtaatcgagcattcggatgggtcgactagcggcgacgaggagatggagtactgtcgcacgcgcatgggtggcagcattgcgaggaaatcgccgagggaaatcttgattgagggataacgggtgagaagatccagcgcgctgacgcgcttcttgacgatttcttcggtgaagcggctggggctggaggcgagatagcgcaattcggcctggagttctgcatccgcaattgcggcatcggcgaggacattgagatcgcgcttcgaagcgggttgggatagctcgatgtaggtggataggagctcgaaggcggaaatgggcgtgtcgatggggatcgagggggaagctgttgagcctgagggcttttggattttaatcacggcatcccaggggaggtcgaagcggcggatcgcgcggcggacgattgagcttgggttgacaggtagcacagcgaggtaatcaccacactggtaggtcatgtccgttggcagcttgaacttgaccacgcgtttggctggggctccgggtggcgtaaggagctcgttttcaatgacgaagccctcttcgagctggagacccagtgtggatgcacgcaaacccgagctcacttcgacctgcaaggaagacttcgacttggctgcgttttcaggggtagctccaccgaatttagccatcacggccggccagaatgaggtctcgccccagccgtcgaaatcggtgaacatgtctgagtttgctgcgtcggcaagaccaatctcacaaagctggttagccccgttgtccttggcgatttggtcgatggccttgggaatacggtagaaggtggacgaccaatcatgatggccacagccgaacactgcgtagttgacaccttccaactcgctgcccttcagcccactgatccactggaagaagtgagccgcgttatccggaggctgtccttcataagaagctgagatgaagaccacaggctcgcccttggggatattctgcatggctgagtccaaagaacttgtctgcgcagcgtacccgtaggcagtggcatcatccgccaacctgcgagcgaacgcctcgcaggttcccgtgttgctgccatagaacacgtgcattggcttcagcttaccatccgcgtgtgcggcgaccttgggcttgcgatcccggctgccagcgccagtctctgggggcacaacagcagagccgctgagtttaacgctgagttgcgtggggtcaagtccatctctcagggttgccttcatgtggaagtccttgggcttgatggtaagtgtctgcttgatgcggagatcatagctggggttatccatctggaagttgaagttctgcagcaaaatcgcaaccacaaggagagcctcttgccatgcgaacggccgtccaatacagccgcgcatgccgtttccaaatggcttccacgcgttcttgggcagcttgtcgaagttctcatcgagcatccgctctggtctgaactcctcggcgtcggggccgtagaccttggggtcgcgatgcattttggtaagcataatagcgatgacctcatccttattgagcacatatttaccacctccaagtgtaacaggatcttcgtggttcttctcggggtgggcgtgtaaggcaatcatcggggctgttggcttcagacgcagcgtctcgcgcatgacagcgttgatgtatggcagcttggacatgtcatcgacggtgatcttgcgtttaccaataacactgtcgacttcctcttgagcctttctgtatgcgctcgggttcttgagaagatagtagaacaggaatgacagcatgccagaggtggtctcgtggcctaagaaagtcagggctgaaatattgcgtccgttggaggattcacttaccagcgatgaggaacgtgatcatgttgtccacaatcgacgcatctgtcatacccttgccagtctgcgggtcccgacccaggataagcgcattgagaagatccttcttgtcaacggggttctccttccgcgcatcgaccaattcctgagataggttgcgcagatactcgatatcactccagtacttgttgttctccgaagtaggcagactgttgagcaaagcagggcgaagactgcgatgtccagaacctaagagcaaaccaaccattgcctcgacaaatgggtgcatttcatcatggtagaacgagttgaagcgagtgcccatggcgcaaagagcaatcgtatccagtgtcaagcgagtgaagtcatccgtgacctggataggaacggtagggccagcccgagcccatttcataaccagttgagtcgcaatatcatacatctctgaaagcaagttagccaaactcgttcgtctgcctgcgtgccgcatagctctgacccgacagaaaagggatacccaccatcgaacatcccgcgaatcatcaacggaccaaaggcaggaacaagaatgcgatgggcaaccgcccagttctcttcgccgggatagtttgcggtgaagagaccgtcgttgacaccgttgcgaatctcatgcagaccagcggagaccattttgccgaaacgttcctcatcgcagacttcatctactagctcgtgggagctcacgaatactcgcggtttgccaaagatggttaatcgaaagatggggcctgaaagtgagaagcacaagaattagcccatgatgttcacactatacgtccctgaccgtgcagatctccataccatagttatcggccatctgctcgaagctgttcacaggcacctcggactcgatgtcgtagatgtttcccaagaatgggacacccctggggcccggaatcgggacctctttgactgaagccatggcgtataaagtccgccgttcaattggggagtttgatcaatttcaatagttggtgtcgtgtcacaatttggaatacgtaatgatgtaagggagcaatggcggggtacctggtcgaggtcgtaatccggtcagccgctgtacacttatgtcgaaatgacccttggagctgcagatgcaataggatgaagaattaaaccaagcttgggagattaaatcctgaactcaggaggaattgcaaagggttataaacgaaaaagtgtgacctcaccgactgtcaagcctcggttccttttttagtgtgctcataacagcgttcatcttgcatatgggatcgctgcacaaattacataacttcatttatgttgcaattcatttgtttcatccgcgtcgcaatgcccggatctatgacggggcatcggtcgaagcccaatcacgatcgccgtgtattaatcggccgtgccgagaactcgtccaccgcctgtcggatttgacacgaatcccgaagacacggcattgtataaaggcacatccgcacagccgaatccactatatccacatgcttagactgtttagagagtcgcctcgcgggaatatccctcttgggtcttatctaactgggtccggcccattatcgccccgactctggtgttgggcccacgtcttggctatataagataaaaatgtactccgtttgaatccgtcttgcttccagaatgtagatggtgcaaatactgggtactaataagatactagactgggctactttccactcaccaagatcaaggggtaagagaattgaaagaaagggtttgtatggcaatatatttacatgaatggagaagcatattgcaaagcaaaaggcggcctaaacaacgccaacgaagggaattgggattcaaggatcaaaaggggatatcaacagaatggagcggacgcgagacagaggcaagcgacagtaggaaaaaaacgacggtaagccggaaagccgggacgaaaagaaaagggacattattccggctccttcagcaaccacagatgcccaagattcatgtcatagcgacaatctgtgagaccggacatggcgccgaccgaaaggaagaagaatcacggaactattcattatacaggtccaaacgcaggttcgtggggtcactagtgcggctgacaagccggctagttgtggacctgctgataaccaccgttcaacttccactcgctctgcctccagtctttctggaagttctgcatctcatcgcggttaagaggaaccgggttgttgcctaatgcgttctcgagacggcccttgcggcgctggcgcaggcataagaacagcagcgctgcgataccaatggcaccggcggcggcggcgccaacgtagactccaatgtgagctccctcgccgagatcatcccatttttctgatagagacttggcctcgggcttgttcagttcggtcagtacggtggagtttccgctgttgcatctcattagtgatatcctgattggctctagattgggcacacttactccaccactttgatgctctcccatgaacctgtctggtccccgtaggtgtactccttgccagtgtggaaatccttcacacgcagcttgccaagggtcatagtgaaaggcgcggaatcccagtcgacaaggccaccagcccactcgatagtaccctgcgctgcgcttttctgaccagcaggccagagactgaattggacacggcagggtgtctgtgggtagtttttgccgtacagggtggacttctcggagtattcgagttcgcgaaccatctcgccatcaatccaccattgcagtttatccttcgcccagtatgtggtgtagttatggaactctgtgtccgcgttcggcacatagtgaaatccgccgcgatcgaaggtgctatcattacccttgccaaagaagttggactgcacttcgctagtgttgtatcccacccattcccaatcaatctcatctagatcgtcggactccaagactacactgctgactaggcctccgcccttggccatcttgacgtgagattcgacgacaccgaagaatatatagaaggtcgactgtaggagcgtggactctccttccttggagagagtgaaattggctccgtcgtcaccgtacacgtatgttccggtcgtcatagaccagaccttttcgtccaaggttgtgttgaagtcccatgtgtgttcggtgcccaaggcgggatccgcaggacatgtcttcttcgttgggtcacagtcagtcgatgtttgagcggtggcgtagctagccaaagctgccagaacggcaatgcgggagaggaacatggtgggttgatgtatatagaggattggtcagggttctgctgtgagactgtccaaaaaaaggaatggactcgagactactcgagattcgataaagagtggatgtgcaagtgcacggtaatgagtggaaggcagtctgccagcaagatcctaacagtgtgttgaaggaaggaacatcgagaaacggggggaaatcagccacgacagtccaatttaggcgtcgagtggactcgggacattatgggctagtggtgtcttgggccctgataatttttgtgcaccgttggagaggcgtaaggggaaggctgcagagactatggttgagtttactagctagccggtctaggctaggggttccgtttttgtgcatggcgctagccgtgttaggtcaagctccaggggccctgtgcatgacgtctaacctgtttgggctcgcccagtggtttctgataaaaccacttttaggcgggcgattctgattggctgctgaccatccaccgattggctgtaaaggaccccgataaccttggatcgaacaggcccatggattgccaggtacaatacggagtacgacaacatgtatactccggattctataacaggttgatacattcaacactgtgttgtagtgtgttattttccatttttagccgcagaaatcccttggctcaaacgcagaacaagactggctgtttagctcatgccttggccattcgaggggaaacttctgcaatgaagatcaaacgcccaattgataagaatcgccacggggtaagaccaggattggactacagatggatcatcatgcatgtgccccttgaaaacaacacttcaaaatcataacaacagcgtaacaacaacttatttccagagttcctccagttcctccgacctaccaaactagtattccagcaacctccgctcagggggtccaaaaacaaagccactaagaagccaagtccgccccgtcaatgagtggagatgtctaacagtttttctttttctttttttcttctcccctgtgggccctttcccctgtcttaccttcctacctgcaaacccgctcattatgtacaatgggataatgcactttcccgaacgatcgcctcccactcttattcgtcgaaacggtgagatcacggctgcggcgtttttcgttcgccgttggatggagtctgcttcgctggcgaagagttcccttaggggaaacttcgggagttctgatcgatcgaacgccactgctcggcggtgacaaacagccaagtagccaagtcctactgagccaggccaaggcataataatccctcactacggagtactcaggtacccgtcagcaagtcgtccgactggattacgtggacatccgccacatgtgaatgtgcattacaagggctgaaaaagattctcgccatgcactgggatatagatttggaaggctggcgtctacagcatagatcggattcccaattcaaaacaaagaagcatcacacgcacagaccaaatccttttcaagtatttctcgtcaagtcgtaaaaccgtgcaatcacatgtatgctgtcatgtctcataaccaacattgctccgtcaaacctgtccacccattccttcgagaaagcacccaaaaatagcaaacgccggtcccaatcgatatgttcgagaccaatggccaaatcaattcccccacaccagcaattccacatctctcatgtataatccgcaccttaattcacccctccgtcctataaaccctagccggccggcgcaaatcatcgcgatcgctatatcggcgtgaactgcgtacactagccggcttctcggcataatcgacataagtcgcagacgggcgacggcgatgtcgccgtccacgggtcttggtgctgctgcgaataaccggggcctggtagacgacctcggacgcatcattcttccacacgccgggaagtcggagtattcgccacagccacaggatcaggagggtccctgcgatcgagccgataacgatacccgcaatcccaccgccggtgattgtgcttgggcagttatcgtcgcttgactgccgggtctcgagcatggagtgtataggagcctagggaagcggagtcattagcttttatgaattccagactctgcgatccgtggttctttgttcggcccgcgcgggtgttactggggtgagccatggaagagagcttcagtaacggatcaccgaggtatgcgcttaccataactgcagcctgtggactatctatttagcaatgcttttgatctgatatcgtgggatttgaggttccagtccctggtggctggcaattgcatgcagtactccgtacagtgggtctcgatgcgatcttgactccagcacccgaaaaaaaaacgtgggtatgaatgagacgaaatcacccatgcagcagatgagaaagggaaaaagggaaacccagcgcaagagcctcaagtcttattcaacccagaatctcacatttcccctcttgactgcgcacccccaacctcctcttatcccgcttctgacgtcaagcggctgtcggtcttggcggctggaaagagcagcgatcttctctttcgcacagcacaaacttggaatttagttgcagtcggttcttgtttgatgccatgattggctgctgaccttcatcgttcttgtaataaaccgtcccggtgaaagttctttacaaaacatactgaccctcggaggcgagacccatatgaaacaggtcacccacatggaacattctttctacattttacaactttactatgatcctctgccacaccaccaaccatgcctaaaacaaataaggatatagagcagcagatccagctggccatggactctctctcagaccaatccaagcctaatattcggaagactgcacgagaattcgcggttcccgaaggccgccttcgtcggcgctggagaggtggaaattcgctttttgaacgacaacccaatggtcggaagctcaatcctgcacaggagaaggctttatgtgcaatcattgcttcctttcctgcggtcggatcatcaataactcgtcgacaaataactgacgctgccgattcaattctgaaggatggccacaacgaccctaccacagaacccccaagaatcggcgaccactggctaaaacgtttcctgaaacgtaatcctaatctgtttcctactgaattagagtcatccaatccacatgatgataatccaccccggccggataccccgtcagtcagctctgaagacaccgagtttagcactccaaaaaccgccgaggaaattcgaagaataagcgatcgtctcaatcgaaccgacccaaatactcagcgcttcaaagacgggctagcaaagcttgcaaagggtgctgaggcccaggctactttggctcttcagctacagcgggaactcgatcgtacacatgctattatgggggcacgcaacgcccggtatgacgctcctcgccggaatatcccaattgctggtatcatcaattcatcctaggtcaaataaatgaagcgaaaagagtatgaattgaacgagacagccgatcaagaaaaaatgaagcggaagtggaagaaggtcttgatcgagattaggaagcgcggaaaggccaaaaaacgtgggaattaattctgtcttgtattctagtagtaattggttaatgaacacagttctttaattagatcatttcattgactacgaggtggtgtagtagatggtacttgtagtaaaaagtaaacaaaatgttccatatgggtgatctgttctcgctcgccagggtccgtatgttttgtaaagaaatttcaagagccgatctaaattggggatatcgtgccgacctgccggagtccccagcattgcagcaaacccacatgcatttgcctagatatgcatgtcacaccatgaagagtcttgtcttgttagtctgacatgcggggaaggaaatcaacggacgattcgggccatgtcgtaaataaatgcccagaaacagccctagagcctaaataacgagttgcccttgtagtatacttggttcctgtgttctatcgtaagtagctcaaacaggctcaagcctgaaacactatccagccactctaataatacgcccgaagacctaataatccttgtccaaccacacgtgtccgggagatggcggaacctgcccttcgcaagctcatatacatatcgtgccaccattcgtcaagacattatcgtgttggagccggtttcacccaatgcttaccattacctcaagaatccgcacgttgtacccgctctcattcgcatggacagtttcaaggatacgacctagaaacagcgactcgggcgccatgaactcctagctctacccgatcacacaacccgtatattctcttgtcttctctcatcgtcgtggttccgggatctcagaatgacgatcaatcgatatgtatgtataagacatgcatctccgtaaccgggttagaattgtcagcaagggcctagatacatagtagggttgttgatattctacgtagttgcaaagataaaatttatcgttcggctttcggctgtaaagtaagccttgcatggtctctctctgctcctttcatgcatagctgaaaactcctggtccaaattatccccttgatctgaataccgtactactactagcagataaatgactataccatatatcgccaatcatacgataccagattggattgactatagcatttcttgaacagaatgaggcctattttctagaatatagagtaagtagcatgtcgtcccctcgtcttctaattggcgcgtacgcatagtaagatttattttctgaattatctcgcagcacctctggtataggcgaagagatcatgcgctatggtgtaacatattacaaactcgaagcccgctatcttgaccatgaaagaatatatatcagcaccaacgtagctgttgatattcatttctatgggctcaccatccttcatggtagaagaacttctatcacaccgctggcccctgggtgtgcgtaccgaccaggcttcggaatttgcgattggtttcaactagttcttgtcaaactgatcatggctggggtggcagcgaagcatttaatcggtttgaaaccgcggaacttcaaggtacccaagaccatactgaactctacaaactttcaacattcgtgttcacgacaaattgacctcaaaccagatggagcatcgatcattgatatagagtcactaatcgatgccaatcgaacgagggacatggataaattgagagccaatagcacggagctataccaatcgagcgaagatgggctctcgatctattcgctcactgtgcgtggtttcaacttccaggaaacttttttcgagtcttctgatacataagccagcacccctcgagttgctacgaggtcatctttattgactatataagcagatacatctacggatgcgagtctttgtaataaagatgagagctttgggccggtgttgatatgtacagttggccaggttggttatgcaatggaggccaaccctccctcctcaccaataatcatatcataattatatgagggcccacccccctcctcttcctcctatactccccacgacagcacctcctggctcaaattccctggcccgcttatactacagtgccatcgggacccgcttggtcttgattgccatcagggcccgcttctccttgagggccattggcattggcagcgatcccagcagcgagctcgacagcgcgatcatccgcctttctatagcagctgtatcaaagaaccaaagatcagcatattattcctacatatcccacacaacgaccaagtgacataccgcttggtacagaacttgatccactaagatgtcaagaggactacctggcgtaagaccggggcaagcgtcacaacccctacgacttttaagccgaaagaaagtcccttctcgtccacgagttggacgaggtcggccgcttcgcccgcgcggggttggagaggcactggggctagaaaaaagggttagaaagaggccaaaaaagatgccaagaaagagatcaaatttacaagcccaggccacggtaaaaaaagacaacaaaaaaaggcttaaaagagacattttgttcatggatgtgtatgttttgaattgatatgaacgtgaagttcttacatggactacgaaattggtttattgactacagggcaagcaatggcttctaggaaggtacgaggctgcaatttctcattgggaaggtacgagcctccttagtcgggtacattcatcaagatacagcaatgatatagtgggcaagatgcaatatccataaattgaagcgaatgaaccagatgagttaatccctctttgttgccgaatccgtgtcttttgccatctgcccatagctcggtggcgcgtcaatcatatcaaacgggctgtcatagctatcaccgacaagcccccatattgagactcgcgtgatccggtgcttggtgagtttgctcacgtcttcacggcgttgttctttcaacaatctcctatcttcttcggggacgtcaaagcctcgagctcgccgacaacatccacattcgagagtacaatgtccaactccaagcctccgcgtaggatcgatcttacggtcaagacaacagccacatccacgagcacagcatccttgtcggccagcacaatcttcaacgaggacgcgatgcatataccatttaggatgggaccgccatagctcaaacgcatttcgctcatacccatcttccagacaggaatgataatgccaccacatttgctccaagagccagtatttagcattcaaaatatcaagcctctctttggcatctttgagcgagtcaagcccctcctcaatagatatctcttcttgaacaacttcccggagatcttcctctgtaaagagaagcttatgtgagataaaaccaggcctgcaggtggcattagggctgtttgcttcccagtatcgatgcaagcgatatctttggagaatattgatatccccatctcgttcgagacgctcttcccaaaagagtttatcacctttcaagaaagtccccactgttctggatacttgctcacggctcgattttatttcaggggaggattctgttttcgcagatgattctatcttcccagaggattccgtcttcccagaggattccgtcttctcagaggatttccttctgggacgggacaataaaaacagcatctttgatgtttgagtgaattcgagtacaaaggatgattgctcggactcatgaaattcatccacagtgctgtcagcttatacctccgacacctaaaaggttgggtgatgacttaatcttttcacaatagaagctcgcttaattagatccgatcccaaagtgattcactttgggatttaggtttccgatctagcaaattcccgaaggctctagaaagttgctcttgtctttggccaagactaggttaggtgtactccgatggttccgtttgactttgtcgcagggaaggggggtatcctgttacagtgagtggtcataggcgcgaataccgtcgatagtggccctccaggagtcgggaaccctcgacagttgaagccgcagcagattatctcaatatagcccacaagcttggtgtgtagcgtcgtttccggcccaaccgcttgccttcatatgttcctggttctgctgaaatcttactgggcagaatatcgttattgaattaccggaggtagatatatatagattgatgggtttatgtaaagaccaatccagtgctataacaccagtaagggtggacaatatatgcacagatgtactcaagttctgattttcaaagtgcacgagcatgaatgtaaaaggaaaatatccaaaactccccgacccatgatatcatcgagaaaaaaaacagcatacaaccctattcatccacgcaggaggccgaaaagtcaaaataacaacgcggtatttcatctccagtcattatcgacccgtgatataatctcggttctcgatcgtcacactcttggtcatgtggttaaccttatagacaccgacaagtcgggcagcaagctcaaactagacaacatgttagctatgtcaacttgaagcggtcatcaacggcacgtaccatattgtttctcaatgaaatgacaatgaattgggcatttttcgttcgttccttgatatacgaggcgacgatggaaaccttagaacaagagttagcatacgtgtccatcataattcgtataagatcaactcacgtttcggaagtccagggcagcatcgatctcgtccatgacatagagcggagtaggcttgtagtggtgaagagcgaataccagcgccaaactggacagggtcttctctccaccagacaagttgctaatgttcttccagctcttcttaggaggcattaccgagaacaagatgccttccgagaaggggtccaatgagtcgaccagctccaactcggcgttaccgcccatggtgatcatctggtacatttctttgaggcgcaaagagataatgccaaatccttccatgaatccattcaagcgagaagatcgaagaccgtccaggcgtgccttggcaccgtctcgggatgtcaaagcgttggtcagatcggccgagcgtgattcgtgctcggcagctcggcggcggtactcctcaatgactgacaaatcgatagaggcgttttgaactttctcctccaaagcagcaatgacagctttcagggaatccttgttcatggcctctagctcatccttggtgtacatttgaagctcagtaggctcctgctcttcgccaatatcgctaatgttctggacggtcagctttgaaagcttctcctcccagtaacgactgcgtttttggttctcagccagggctttctggttctcttccaatttatttcgcatctcgatttcagcagctcttgtctcattgagctcagccacctttgcgtcaagctcgtccttcatggccttcagctcgccctttttagactccaatgcctaatgatggtcagcagcaaattcaatacactcgcggatcttgggtaaattacctcctgggcttcgtcggccttctgtctccagtcggcagattcattggtctggttggcaacagcttcttctagtttttccaactcctctgcgatctgaccaatctccttctctgagatatcgcgggctttggagtgcttcttgatgagtttgtcgttcttggacagctgcccctccgcgtttgaaatctcctcagcaagcatgccaatctgctctttcaggccatctaccttcgccttttgaccgcgaagccgaacaccaccgacctccatgatcttgctctgcaaggtctggatctcttcctcaatgccactcttctcttcattgagttgagcgatctgcttttgggctttggcaatctgtttttcgagggcagcaacctgggcttcatctaaatcagatggctggtgctgtgcgcccagctctttcacgcgtcgctgggcatcagcaaggctgcgcttggtgctgtcaatttcgatcataatcttttggatcttagtctctaagcgtgggatttcctccgatctttccttcatctgagactccacgtgtcgctgcttttcctggaaagcctggaatttcctttccagttcctcgagatcggattccaagcgggatacctgctcctttgtggtgtctgcgacttgctttgaggacataccgcctcgggcaacacgggtaccaccaccgctcattgttcctgacacatcaatcaactggccatcttctgtcactactcgccaccggcgagcaccataggcaatacgattcgcctgctccaagtccttagcaaccagcgtgttttgcatcacactatagaaagctggggcgaacttgggatctttcggcttgacaagatcaaagagacgaggaacgctttcaggtgtgtagatcgatgccatgtcgcggcgaggaagacggtcaagaagaatgaagttcgctcgaccaaggttgttcttgcgcaaataatcgatgcattgctggccgacttccacggtctccaccaccatgttatcgagagcaggacaagctgtagaaatagccacatcgtacttctcgtcaattgtgcctagattaccaagtcggccatggaaaccatcgatacggccagattccttgagacgcatcaacccagtcaagacgcttccacggttttgtgtgcttgcgagactgactcgtgcctcgtctgctttctgacgggcactagagacgtgcgaacgaacctcgggctcccgaccagcgtatttcttcaagtcgtgtttgagcttctccacttcagactccaaggtctctttttgagcttgtcgctcttcgagttcgttttgtttggcttgcagactctcttcgatggtaacaaccttgccctgtgcttcttcgaggaggacagcgcccgcattaccacgctctcgcaagatatctagctcactctgagctactgcaactgcggactgtttctcgttgatcttcgcgttccatggctccagagacttttgcttctcggcaatctggtcagataggccttgcgtcttgccttttagcccctcgcggatggaattcagttccttctcttctgtcaccatctccttctcgaattgagtggtttcggcagtcttcttctcaatgtcgtaggtaaacttctcaaccaggctctggcattcagaagcagcaaggcggctggtctgcatggctttctctaactttttctgtttgccgagcaagaatttcttcttctcctcaaacttgacagactccttgtcgtacttggccatctccttgagcaaggcttgagtctccttctccatcgactcgtaatggcgaacccccttcttgtaggctttttcgagctctttgataccggattcgtttccttcgtgtttctcgagttccatgttgagtagctcctgcatttggagaatggcctcttccgtaacacgaacgttatcattgcactcgtcaatgtaaatttgatatagcgctgattgtttctgtgccaattcgttctcctcacgtatgtaagccaacgctttgtttttcttatcctccaaggccgtcttctccttctccacgtgctggacacggttgttcttctccacgcatacgtcgttgagagcttcgagctctgttgccgcttcatcgataggtgtcttgtacttggaggttccaataatatcttccaggtattctaagaggccttcgtcgtgttcgttggaggctttgggtttcatctgagcgatcgactcgacctcaccctgcaaaatcaggaaccgcttgtggtcgagatcaattccgcgatcgcggaggaaggccgtcacagcggtgaaattggtttctttcttgttcatgtaatatttgctggtgttattcttgaacgctcgtcgcgaaacaatcagttgggaatctgggaccacttcctggccaccttcgggcaaatcgaggacttgtgagaaatgaacctcgacttcacaaaatgcaaggttgggatactgagcagagttatgaatcagcgcagagattttgccctgtcgcatcttgctggcgcggaaaccaaatacaaacaggagggagtcaatcacgttggactttccggatccgttcggtcctacgacagatgaaaaggaggcgtggaacggtccaacgatctgctgcccagcgtaactcttgaagtttgtcagaataaggttctcaataatcattcggggcttgggcgccgcgggctcctcgggcgcttgaggggcctgcgttctagacttggccacaatgtccataggcctctccaagactgtcgagttcgggtttataatggaaatttgagatgtgggcacttccaattgtctcgatggcgactgattcacggcagattcggtgatgtcggacaacggtggcacgcttgctcggtgcgctctttcacgaggctctggcgattgggatggctctggagttggaagtgagccctgtgccggcttgagtgtgattgagccgtgactcttgcggggatgagccatactttttcttttcaacgccgctttactggaaggagattctggatctacttccattgacgccatcctaactccctcgtcattctcatcattttcttcgtctatatccatcgcatcaatgtccatcgcgtcggtgtcggtgtccatcgcatcggaatcatctgttggcgcttcttgggtcttgctagcagcgcgcacagtaggaggtgtgacggggtctattgtcattctcttgctcgatgctctctttgcttttttagggactggagtgtactcctcctcgacctcgtcatcgtcatcgtcatcgtgcgtattgggtgttggtgttacatttccggggtcttctgattcagatgtatcttcaatgacataactccgacggggcgcagagcggcgcgaagccctgccctttacgactgaagccattttgtgcagatcagtgggatgtctgctgcatggagaggggcgatagtgttgtgcggaggttttgtcagttcaaagtgggttgtttacctcgtgcccaaacgggtaaagtgtccgctgttctgccacaacaagcccttcaccgccatgtcccgctgtaatttaccgtacggtaattactcctccgcggagcttcatggggatcagcttgggaattgttcacacaaaccatcacttctctcattatgcccagcatggctccatgggagagcttcgaccaagccttctcatttaataagaaatattcatatgagccaaaggtttttgaccagattctatccaaccggcgctcgttggaccagctctttgccgatcgactcttgggactcgtcggcatccaaggaggtattgtgacttgaagctctacgcttgaagcctcgggctaatcaattacctctctatagtgaccaagatctacccgccgaggaccaactcagatctccgaacactgttcggccacatcgtttcctcggacctcgatatccatcacaaacagtccttgatctattacatcctgaaggactgccgcactgcgccagaagcttcgtctcagtttgcgcaacaatgccacctgccagagaagtaccgtttcttcatcgaaggtctttggcatttggatagactcgatttcagggtgagttgtgaaccatcttgagggcggtcatcttctgacaattccatgatataatagcgcgcagtggagcatctgactgaaccctcgctcattcctacctttcccgatgagattctctacgttcttaccctcacaaagcttcccaagcatgatgacagcctcgcaatcgcctactacctcactgcggctcctcctcttgcaagcacaaagatccgcaaagctttcttcgatacactcgcccgagcaaacctcaccgaggcattctacttcacgcgcaaatacgacgacactcttcgtcagagcttttttgagcagttggtggaatttgttcacaaggccacccctggccaaaccagaagtagacgtgcgatggaactcgtcggtcttccacttgatgaagatgaagaacagtggtttgagcacgtattactgcagggcaacgctagtacccttcctggagctaaggatactgtgatgatgcgacgccttgcaactgggcgaactgggcaactcaacccggagcttgaatccttgggtggcaaaaaggtcgatgggttgaattgggatgaccttcgggggagcatacgacacacgtagatgatatacccaaccagtgatctatactggattcaatgtttattggttactcaaaaatgaaatagcaatcagctttaatagttttaatggctctgaatgattttctaatggtattttgttttctgtcggttctgtgctaatatatacaactctttgttgatgagattgcatccactatatgagctggattgaacttctatatctcaactccttttaatctcattccgaggcaaagaataaagcaataaaaatccaatctcatactctcaaacattaaagaatcgtgctatacaagagtgctgtgagtattttgtaggcgttccgataagatacggaccaattccgcgaaaagtcctaaccacaggagttcagtgtttttctcttcgcgacaaccaaaccctattcttgattttctctcaaattgcttgatcacatatcgaaggatacggattaatccgagagaagccgttgagatacaggccttgctttggaggggagcagttgagcaaccaccgaaaccgcgaagatggtggtatgcaacttttttcagcagggtcgctgcaagtttggaggtatgaatctcttgtgtgtagagaaatcaaggcactaatatatctgaagatcgctgcaagtttgagcaccctggcaaaccgactgctggtccatcggggaatcgattcggggctttatcaggaggatttggaggtacgttcaattggattgttcttattcagcgttgctcgatgcggagagtccatttattggacatatattgtgtcgtgagattgattgttcgatctcgatgttcatttgttccccccatctctttctcttgctcttacccttctacccctgctgggcttaccccaaactccttcgagtccgaagtgcaacgaatgtttccctgttcaaaactatgatcaatcctgtgaaccacatgcccccccttcgggctagtcttcttccaaaccctaacgacaaaattacgacaggtcaaaaccagactcaacaagtagccgagtaagtcgcatccccagcgccttcagtggattcaaactgacaacaggcagcccagtagtgaaggcaagcgaaatcaagcaagatttgaccgctggccagggccgtccggaatggatcttctccgcatatgcgccccacagagatgttgcgcgccagctgttcggcggagctcaccgcgaacgcagcatggaagagatgcgcttgcgccattatgaattagcagcagccggtaacctgaatgaagcggtccaagaagcctcgtctctgtggcaagaatgcgtgcaacagatggaaatctcactgaatgacctgaatggtgccgtcaaatatatcgttgacggcaagaatgaacatcctaatcgactggacattatcgagggaaagacccagactgttaaccaagctccagcaccatttggccaaccctctccattcggccaggccgcgcctacacccagcattggtcctgcacctggagcgttcggtgctccttcctcgacatttggccagccatcaggagttgggcagtcagtcggattcggtagggcttcagcaccagcgcaaccgtctggcttcggacagaattctgccttgggtagctcagccttcggccaaacctccatcttgggaggtcagtctgctttcggcaaaacacctttcggccagccagctcttgctcagccaggagttaacccaagcccattcggtaagccgtcagctctgggaggcgcggccccattcggggctccatctgccgcttcacttttcacccaagtagctcagaaccagcctgctggtggtgggtttggccagagcgccggacaacctgctccgtcgcctttcggtccaaccgctggacaatctggcccgtctccatttggccagccagctgccaacacgagcccatttggtcaaccctcagccccggcaggcgctgctccattcggtcaaccttcagccccgacaggcactacgccattcggccaaccgtcagctccggcagccgccgccccatttggtgtttcatctgccccttctcccttcactcaggtaccccagaatcagcctgctgcgggtgggtttggccagagtgctgtacaacctgctccgtctcccttcggccagcctgcagttcaaggcgtgccggtgcagagtaccaacgccggccctcgtgcatacatcaaaatcgaaaaccctcaagacctcaaccctcttccacaactggagggcgaaactcgacataacccatccactaaacaactagtgatgtggaagggccgccctgtcaagtatatcaacgagcatccgtgctaccttcacccgcaagacaacatcacctttgtccggatcaacttccctaacgggccacctgatgctgctggtttgaaagacgcacacggaaagcccgaggaatacacaccagaagtcgttgaggcatatcagtttttccttcagaatggctacttcaaggacggcaacattcccgcagtacctcccaagcaggagtggctcagtttcgacttttaatccccggagagagcattttcttgtccttcattttattgttattcctatcacgcgtctcatgggttgagatgacgtttaagcaacatgttccgggcgtgcggaacattgggactggcgcttaggagctcaacaatcaatttatgcatgtagcaattcgaagtgctttaatttcactttcaacgcacaaatttacggtctaggaccactaatgagactctttctttgtttcaagatgtttccattttttattttttaaattccaggttcgaacggaatcccccgcagcgcgaaacaagtcatgcgggccagaactagctccaaagtcgtgccgtgcactccaaattggccagtccacgatccctccccgaggcaagcccagcctagcgcatttatgcggcaatggtgacctcaacctcaacaccggcctcgatgttgatgatgatctgcttgacggtctcggtgggggcgagaagacttaagtagaatgtcagtaactgcatctgctatagcacggcgatactgccacaactgaatgggcgggaaatactcactcgatgagacgcttgtggatgcgcatctcgaacttgtcccaggtcttggaaccctcaccgttgggggtcttacgggtggagatctggagggtcttggtgggaagacggacggggcccttaacctggagggacttggagcgggcacggtcgatcagctcctggcagaccttctcgagggaggcaaccttgcgggaggtgagggtgatgcggatcttgtggaccttctgtagagcggagaagcaattagtacatagtttgcactggcgaggtctatggacacattgcacaaagcgacagctacatcagggtgtagcagcgattgcgacagtgaccattggatcaggaacaacgtacagggccctcgccgaaatccttctcgggcttctggaaagacatcttgaatttgtatggactgaaacgggttagtaagtcgattagggaatttcaagagcagaaaaaagggagcgcgcacaatttaaaaggcgattgccgtcaagacctgaactactaggctcggtaaagtgatgatggctgttggagtgatgtggatcgagaattccatatccaaaatgttcagtgcgaaagtcttggcgcttcggctatcgcacgctaaacccctttaggtcccctttcagtagttgcttatgtcatcaccaaaagaggacaagagactgccaagtgatggcattcgaggtgatgatcagggctgacaggtggctacgcgtttttcctttgttcttgcttttctcccccttgtattactctcatattcccagtcataaccaccttagatcgccccaatggcggagtttccggtgctggctccagtgccatcccccgcagtgcggaggacaatcccatcaaatgactgggaatcttgtctagatgcatggatggccctgttggggattcgcctgaatgcatcagatcaacaatttaaggttgtagcagctgaagatccatcaatacccccattcctgggatcttactaccaatatacggctgcgggggattctagtctacaaagtggacctaaagctcgacagcttcggaagctgtgctttctggcgacaagaagatacatactcgatctctccaatccaccagatggaattctggactggaggtttctcggcaatctatgttgctgttacccttctagcgcggccctgaagacgtcattatcaagtgcctgggatctgcaccagggcaagatcacttccagtatggagagagcaaaagcagttgtgattaagaacctctcttcggccaactcatcgtcaaaccctgaagtaatttctgacatccgccgtctgaccatccttgcttcagtgctgccagcgtgtggccaggagctcatggcaggctccgacttcctggatacgatatcggaagcctaccaggcaagaggtgcccgggaggagtttcgtaagattctcgttgctaatatctacgtcgggctcgtttccttattgaaggagccagtcaatttgtcttcgttattggatcagctgttcagcctcaaagccgctgctcgagtgggagcgccaaaaatgaagagggaagcaactctactttctgatctcatctgcagctcggacttgcttattcggctggacaagtatctgagcattcacccccagaaacggggacaagatcttcttgccagcttgcgcacctatcaggtggaatcgaagtcactacaccatcggtatcaaagacgcaagaaagtggacaaaggaaaagaagtatcctcgcatccgatcgtttcaggggaacttcacgcacacaagatgtcactagtcactcaagtacaagacctcttccctgatcttggctcgggctttgttgtacggctactggactgctacaatgacaacccggaaaccatcgtcgcccacctcctcgacgactcacttcctgttgagctccagtctctagatcgatctgagcaactacctcccacagcagaacctcaccatagccatatgtcaccccacccaacaccacccgaatcgcctacgttggcaccactaccagcccgcaagaatatcttcgacgaagacgtggacatcgccgaactaagccgctctggcgaggcgcaaggaaaattgtacttcggccgcgccgacccagaccaaacagccgacataatcctctcagaccacagcaaacacgccgcaaacaaagcagcgatcctctccgcgctcgcaacattcgactcagacgacgacgagcgcgacgacacctacgacacagccgacgtaggcggcgccatcgacggagccacaggtggggcagacggcgaagccgatccagccgagcgcaaccgccgtgcagccgataccgaaacaattctcttccgaacatacaagtccaatccagggctcttcgcccgcgactcggcgacccgccgctcccagccgcgcggatcgttgaagcgcgagaccgaaatgactgacgaggctatcgagggctgggctctcatgctaacgcgtgatcccaagcgtctcgcgaaactcgaagaccggctggcgatggatgctggcgcgttggctggtgctggatcacttaaccagcctgagttgcgtcctacgtcttacaggaggccacagcctcgtgagaatggagacgagggttctgatgagggcgagtcttctggccatgctggttcgcggggtggtagaggaggtggtggccgtggtggtcgggcgcggggtggcggcggtcgtggcggtcgtggccgtggtggtggtccttcgtctggtggccaagggcagccagatactacggtgtcgagacagaggaaggaagagaataagagtagtcgggcgaatcataaccgccgacagcagcacgcgaaaaagatggcgcgtggcggtgggttgcctggctaatcacacgaagggatcaagctggcttgtatggatgcaatgcggcataaccgccttggtcattctctatttttgatatctagtaatgactgtgcatgtaatttacataacatctgttgggcttctatagaagagccacgacgcattgaaacagaacgcattcaagtaattcattaatatacctcaacaaatatagaatgcggtatagacagtcatcataacatgttcgcacagggaactcacttggccagcaaggaactgacgcttcgtatcagtggtgatctgagaaggctccgccttcggtaatggacttgcggcactcctccatgaggcggacctgtttcgcgacgtcaccaagccggctgataacctccttgttaccatcatagaaggtaaagatagcataggggataccagtatcgcggcagaactcgatgacaaacttctgcgtacgacgtaggttgtgacgcggaatccgcgggtagagatggtgaatggcttggaattgcaagccaccgtggaagaaatccagccatgttgggcagtcgacgtccatagtggtacggagcatcttctgcgcgaaggactcaccgactcctaggtcggcggttgacatagcgaagtgggataaggtgatttgaacgtgtagtggtgaggaaacaatatgtgagacgaggaggaagatgatgcggctgcttgcatcgggaagcgtcttgtacatcacaccgtagccaaaccaggtccaaaagaagacctgtccgaccagctcaaaccaaacatgccaccaagcagggcctcttctaggagcttggcccttgagtaggtactcccaactcaagacatacagattgaaccgagcgagcatcataatagggtagtaagagtagttctggaatttgagcagaaaccgagccggggcatcgaaagtcatgattcgatcgtaataggtactccgtaggctcgtgaggaagcggtgcgagatagcgaagaatgggatatgctcgatatccgggtcatgctctggctcattggtcacgatgtgatgaacgttgtggcttcgtttccaccacccgagacttaatcctccgagatagtctgcgatgaatattccaataagggtatccacatggaaattgtgtgtaatgcccatatgaccagcatcatgggcggtgaaaacaagctgatgccagaaacagccgaggaagaatgccgaggtcgcccaccatcccatgcggaggaacatataggaaagaccggcaaaaagggtataccgacaacattcaacgaagtaacaagagtagtcgcagtcgtaaagtccctcggccttgatacgctcgttcagttcgcggtattttcgtttgatctcttcctgacttgcggtatccaaggaggggtatttggcagtgtccaagacgatttcctcccgtgttctcgcatccaagaaggcaggcttggcttgaggttggtcggtcaaagcagatccggccgctttccgttgacgaactgtggatttcgagtcgaccgcatcgaatatcggcgagggaggaactgatccatcttggctggagccactggagcattcttgtgctgttgaatcctcatcactcgcgcacgtgtcttcggcataagcacggaacgtgccgccctggatcgggggtcggaaattgatccatgtcccttcaattcgtccaatctggtacgagtgcatgcgcttgcgggcttcttcggagtgtagcctatacgaggccggtgtcaattagactgatcaaaggtggtggtgtttgccgttccaaaacatacgcgttgatctcatctgtcgcatccctgcccaccatgtgcttgattggcttctcccctccgggatgatatctgatgaatgggtctaccttcaggacacggccctcgaagattatgacatgcttgccctcagctatcaggccttcaatatatcgtcgagtcaagagggtatccttccgggacggtcgggatgcggtcttctccatagtatgcggtgcggtgagaggatggatgtgtgtagggtcagataacatggggttacagtgacattgctgagagtcgaactaagcaactcaccaaaagcatgcaaaatgcaaataaacaaaggaaacaagaatgagattgaaaaaaggcagaaacattccaagggctatggggcggaggtggataacagcggggacccgatcagcgtgcgtgattgtcacaccttcacattaccaacataccgaggcacgtaactttttgacatggcagtgagtctcgaaataaattggtgttggctacattgctctaatcattctatacctatagcaatcaatttcctccttgactgagcaatggcttcattgggaccaggtcaatatgattcatgtttcatctcgtggcatgatcccgctgactcgggtatataggatcatacaactcgcgtggaaatagaacaacttcgggactctaacgccactgatgagctggaaaagcgccttcgaaatcgtacgtccttctatgttgatcctcggcgcgtatctaattcgtgtatacatctaggcattgagttcggaacagctggtctccgaggccgcatggccgcggggttctcctgcatgaactcgttgatagtcatacaagcctcccaggggctggccaagttcgttcgagacaagcgtcctgagatcgcttcgaagggcgtggtcattggacatgatgcgcgtcacaattctgcgaaattcgctgcactcgcagctaacgctttcgtcgcacaacgcatccctgtttggtttttcaatgtggaaggaccaacacccatggtagcgttcggcgtgaaccatttcggtacggccgcaggtattatggtgacggcgagccacgtaggtctaccccgaaactacttttatcgatggattggctaatcggctcgaagaatccaccccaggacaatggtatgttacccatttctgatgctgtaaaataattgctgactgttttataggctacaaagtgtaagaactatgaatgtatatcatggagactgctgacaagatctgccttgtagctactcgagcaatggtgcccagatcaaccgacccgaagacggcgagatagcacagtcaattcaagaaaatctcgagccatggccgaccgcatgggcggaattacagccaggcgaattcctgcacgcggattcctatcagaaattgctgcctcactacagtagccgagtcgcagagttcacggtacgttgtgggctgtgcttcaggagatcaatctaacgagtttactctagaaatctacggtgaccaattggcagcccccaagaccgttcgtttatacacctctgcacggcgtcggaggtttggttcttccaactttgtgtcactcacttggaatcaatgactttgtatccgttgctgcccaggaaaagccagatcctgaattccccactgtgaagttccccaatcctgaagaggctggagctttggatcttgctatcgagactgccgaccgagaaggaaagaccttgatcatcgcaaatgaccccgatgccgaccgtttcgccgtggcggagaaagtggagtgagcctcgatttctgactaccgtcaattgatctgaactaacatgtttccagtgggaaatggcacactctaactggaaatcacgtcggtgtacttctagcgtcccatatcttggattcgttcgatgccagcaaagattggtcccacatcgcggtgttgactacaacggtgtcgagcgggatgcttggaaagatggcagctgcaaagggaattcacttcgcagaaaccctgactgggttcaagtggatggctaatatcgcccgggacttggagaaagagggaaagaccattccttttgcatacgaggaggcactgggatacatgttcccagctgtctgttatgacaaagacggcattacagcagctacagtcttccttgcagcggaggcgaaatggagagcccagggattgactgcatatgcgaaactgcagcaattgttcggcgaattcggccatcacgagaccttgaataactacttccgatcacccaatccacagctcacttcaacattgttccagggtatcagaggcagcccgggcctcgccaatatgcagtttggccccttcaagattttacgatggagggatttgacccagggctatgactccagcacccctgataacaagccggacttacctgaagatccaacaagccagatgattacgctgtggttggagggcggggtacgcttcacatttcgaggttcgggcacggagcccaaggtcaagtgtacgttttcccactctctttcgagcgaaccaattactgatatatggacacagtttatatcgagagttgtggagactctcgcgaagacgctgtcaaagcagtctgcgatgcattcctcacgattcggaaagaatgggtacagcgctttacgccctcgatgacatacagcaagcaactttcgacatcgtctggtaacattctgaccgttgaatgaagacgtgcgtcagatcaataattggctgagattctcgaatgaccggcaggttacctgatgtagccaaggcgcccgccgcgttcgcaatgcagagaaatgtggtcaatatattgtgaacgagtgtaaagatggcaattgaactactgtgactagagagatcgactgcctccctttcatatatgtacaaagggtcatagcgagtgtattctctaatttacttccctccgtgatgctgatattagcttcgaaggaactcctgtgtctaggggagctgagcgaaaggatttgaggcctatgcacaaattcttgactctcatctccgcgatcaccagcggaatgatctagagtggatcaagtcgggcaaatcaaaggcggcgtgcaagtgggcagtgactctcctggctcaatttctgctatcatctgcacctcagtgtcatccgcttgtgcttcagtgccatcgggaccggcagtacagaggtcgattgcaaaagttctgtcacactcattttcacggtagtataaatttactcctaatacaatgaggttgtttcaaactgctgtttcgattccgttccaatttgattaaatacaacatacattatgtagtttaataaagcaaccaactaccttccgccttctaaagcaaaaataaagttgatacagaacttttgaagtcgacctccggccatcacgacaaccggcctaatcgtttattaccgccttggttatgtggggctcactgcgtactccgtatacttcgaagtatgaagctattcagagaccacctgatctgtcaatatgaaacaatttaaattattggaatcatgaatggaattgctgctcgtaccccccaggatgacaccggcctaaattttcagtaccgttttcctaagttggttgagtacctagatctatataccagtcgaacaatccgagggcctttcagccttcgtgaatttgtccgagaactccgggagaatgagagccccttgaatattgttggtgctgtacatgtcgccgaactgaatcccttcttttgattgatatcgctttcgtgagtaggctctgtagatcgagccggacatttcgtagactacggtggttctttggattgcgaagtcatcttcaggacctccaaaatcttcggagtattcgagaatatacattttgaagggggccacgcatcaagcaagagaaaaaaaaagcaaggtcgattcaggtaggtaaccggtctgggagtcacaagatgaagcgggtgccgacctagttgcgattaaaagggctgtttgcactttctcgtcagccaaggcttgtgagaggagtcaggaggagcatccaaattgggattcctccttcaaggccaaatatatctctcgatcttgggcgtatcctcaagtctctttattcatacatcaacatgcatcatcatatgtatcgacagagcaaggcgaggaagaatattatcccacaatgccatcttacagaaacccaacaaaacaccgactgctatgatcatcatcacctgtgtcacgcccaacaagctacgccctgctcaagagaccatcacctccatctaaacaacaccgatattgataccgtcaaacatcgggcatatcacttacgtcaagccccaagtaccaaagagacaattcattgttatttttgtcctaacttccaaggtcagggtcctcgcctcaaaatgtaagactggatttgcacttgtgttgcgtcggtatttcttcacctctgaacgaattgcaggaacaacgtcgattccgacccccttgtacagcaccatgagatctgccataaccgacataaaagccaacatatccacccgcaatcccggtctcgatcttccgagtcgagtgaagacgaagaacaccgctaccacaccgagcattaccatactcaagggatccagtccaatgagcgacaacatcatccacctacagtcaagcacgtccactcaaaaagttcgaatagcatgtttgaccatggccatcaccacgctgcaacaccagcacaaagtacttgtgctcatgctaccgtgtttaattcacatgatgacggatgcggtagcaatatgaaagccgttagattcgaagaagatgacaggcctgagactcaccattctgattgtcccatacatggtaccccgtcccatggagaagaccggtatggtcctcatcgcaattcccgtcaataccagtcccaatgtcgagaatcgagaacttacaggtgggtttggggccctcctttacccgtggtggcccctcgacgtgaaaagacttattatgcggagagatattgagaaatcgtcatagataaattgaatgcgtatcgaatataaagtcacattctacaaatttcagcttccattcttgtacctactcacagcaacgtaaattcccccgtctgatgacttcacttttgttcgagcacgccacctttgtcttttggttcggaatggaacacataaaaagaaggggaaacttaatgaagcagctcacgaccctgttatatctcctcgcctgttggcctttcccaaagccaaagtctagctgcctatttgtgtgggcattttcgcaaatatttccaccaggctaggtctgttgggcgactttaacgcaatgtaggtacgtatggctccatgagattccatgcggggatccctgcagatagaggattacatgaaaggagtcgggctcgatttccaggacaaataataaggaatacctccacaaactctggatgagtgtgcagtatttccacataaccctcaactaataggtatgacagcgaggcgacatggaaacatcatacatcgtagctacgagagatggaaatatatcgccatgagaagattccagagagcaaacaggcaggaagatctcaggcagcaatgctgccaatagcaacccatgcggggtctgccagctcatcatcgcatacaaagctgaatgccacccatactatcgataacatgtcttgttaactcggctggaattatttaatatctgactagcgatggaatgctgcaaattatgtgatcggtcttttagtgaccggcaagcttttcaacaacatatgcgagatgctccggtacatactttgacatttcgatgcgacccctgcaatcgtacttttgtcagccaaagcgccctggaccaacatctccgagtctcgcctgtgcatatcatcacatatgactgtgagccttgtagcaggtcttttgtcagtcaaagtgccttggaccaacatgttcaaaattcaccggcacatgcagtatcattcaactgtgagctttgtaatagatcctttggcagccaagatgccctggatcaacatatccagtattcaaaagcacacatcgcgccgaccagcaccccgctggacaagttcttccgatcctttccgagcttcagatacaatccaaaattacccccttcggaatcatatgcccagctcagggagttctgtggctgggaaaaagagaatccagatggggaaaaggcctggaagaaatatcaatctgctctcgaagctgaggttaagatgtggttcggagctgaggatgaccttgacgcctggcattctctttgtcgagctatcggaatcgagcctttgcctgaaacctgtaagcaagctgtgagggtaagtacttatcacgtctgtatatctgcatgtttttttatgattcaaaacggagatctacaagtatttattattgagattgactaataaattgatttaggtcatccgaggtgtgttcgtcaatatcatcgatttgatcgactgggctcgaagtggaagcacaaccaatcgagtgcaaaggttctcgagcttagaacagctacggaaatataccaaacaaacgggaaaggtattccacaatcggcttgacgaagatgatgatggaaatgttgtccttcggcatctgcttcggtttcttttcaaaacaaatcgtcgttatgactgttgatgcattgcagaaggaggctgggtaaaatggtcaatttgtttcattctcactgatgtagataggagatcatctgcaatatatgggaaatgaaagctcgagagacaaaaggacctcaagtgaattcctagtggaccttgggaactcgtcaacttgattaaaaagatcagaacttaacttagaagtgtaactcttgaacattgcccgatctggtgcgaatcaagatgccgattcatttgcagcaagggagttccctgattataacttgagaaaattaaagagaatgacaatatgtgagaaagcattgaagctttatagaaatgccattatttcttcatctttttatatcccgctttcacattgtcattactcgtccaagatgagtttcccgtctcttttggcagcatcagcatcttaggctagcactttctttgcgccttcacaagccatatatgataaagtacgaccaaacattgatcggctttttgggtgctgattctttatctagttttggtactatttttggtactatatgattccgggtttcaattagaattaagtgaaatgtggcatacttataatagtaacatacgtataacaacagtaataacacataactagcagcttccagatcgaagcacatacaaatgacaaccctggaatgatattggaatcaatccatctaatgaatgagggatgacttgttctttccacacaatccaagaaggctcagttcatataatacaaaagacctttccaattgtatgaacatggcccctagagtagctttccttagtgccgcctgtgggcacgtcttgcatgtctcggtagcgtggccagttcggcaagcgccgtgccctgaaagcgaatttgctggacatatcttggttctcttcggtgctcgttgatatcggagtcgtcagatgatgacaactccagtacaggctggtatgcggactcgtatcgatgccccgagggatgaagttgggtcctacgcaatagatcttctgtttgcacctgcgcagttggagccataccaatagcacttcgtcgagattgaccgacagcagaagggtatcgagtacgatccatcgccctattggtaagaatggtgctacgccagtcgtttcctggcgtttcggggaaaacatgacttctatccaagagtctggaggggactctttgttggatcaccatgcccgtatgaccgtggttacgtgcacatatatctgcgtagttctcactggttgtgaaataagccgcagctgccggtgtcgatgaaggtccccggcacccccggtaatgacctcatccggatttcccgttcgaatgtactcttcagcccgctctcgggcagaacctcggtagattacacgggatggtctggacctcatatagtcagcactatttaagtgaggtatcggaggtagtttcacgtacggcccattagccgtagcgggatatgccgagctggtttcacgaactgtttcaggaccgtaaggaccaatgatgagtctcgactcgctcgattgccatgatccatagggggtatcatagtaacttatgaaagaatagatgagtaccgtttgaaataatatagatgatggcatgatttactatagcacagtgcgggttcgtgtgtcatatcgtggctgtccgtccaagatccgtcgatgagacatgtgggcaattctctggaagtgcaaagatatcagctcttacactgggttatgccaagaaagggctataggagattcgatacgagagaaagacaaggaggatgtcgaagaccttgagcaatagaaagctataaggattgaatcaataacggcatcccttagtttaattattatatgtcttctacaaccatcccagaagcaaagggaggagaggggtcagacagacgccactgaaatcgaaaacagagcgatctaatttaggtgctttttaacgccagcttgtatttcagtatgtgtttcaacgggtattagttgagattactgaaagcaatactgctagactgacacttctactgtgctgattgtataattgaaactagccctgcatgctccaagcgctctcaagttgtgccagagctctccattgggaacagtggcgtttggacatgaggcgagtcaacctgcgcggatcattatatttccggctggcgtatgcggcaacatcctaaaactcaaatctgacaggcgtgtgtttccgattatcttgattcctctcttcgccagccaagcctttttgcagaatgtccacagcatgctggacatgccgcaatcgcactatccgatgtgactcaagcagcattccttgcgtcaagtgcgagaaagctggactagaatgctttgaacaaagaccgctacgatgggtgaaaggtgtagcaattcggggtaaaatgcgtggacatatatttggagaggaccgcaaagcttctgatgaaaatccacggacgcaactagaacagaaacaagtcatacattcgcgcacgaagtctttgacaacaaatattacaccctcgttcgccttgcaagatccttgcatacacaatctcgaccggtcatcgagattctatcttgattattgtgggttcatggcgagctaaatggtcccgtgtgtgcactaatgtcagacaagataatttacgcgtcgccaagttgttcattctatatgacagtgagagcaatccatttagaaggttgctcacttatgcgatggaaaattcaaccttgcgaaagactatagttgctgttgctgcaagacacttcgctaatgcaggccagtcatttgatcaggtcaatgatggcttgtcgcctcggtttatcaatgccaatttggatgcattccatttcaaacagcaagccatcaaggcattatcattgtcattatcccatccagagccttctcaaaaggacgcgataatgccagcaattctccttctaattttccttgatctcctcgagtccggcatcgaaggttggaaatatcatctccgtggtgcagaaggcctggtcaatctttctcactcgatgctggagcctagtgatagtaaatctatcaacggcaaccctggagagacggtagaggagacaaggcgattcatcacccgacagttttcgctgtatgattccttcttccctatggtttgtagtgtgaggtcgctgacaatagtagtgtctcaacctttggaggtgcactctcaggttcaaagtcgagtcctgaattttgtatgaacttcgacgaaagcaggcaccatgaatccattattcgaagctttctgggatgtcctgtattccttcttagagctatccgttatttctcgaaccaaagacacgtgattaagagcttagacatgcatgatgacctctcgattcacgagcatgtacaaaatactttgagtatgcttgagctgacagcaaatttcgattgtctggaatgggcgtcagactccgtggaatcaagcgtttcctcagcagcggagcttcaaaagctttctttgctatctcaagcatacaaaactgccaccattctctatggaaaacgagtgcttcgtgctttcaagacatcaaccgggccgacagcatctgacaatgaggagttggtgttgcgattacttgacgtgattgagtctctccaatgcgacccggctttgttcaagtgcctattgtggccaaccttcattgccggtctcgaatgccagactcatagtgagcaaaacctggtcattggatttctgaagatgctttggaacctgaccagttgtttgaatgtgataaacgcttctaaaatggtgcacgacaattggaagcgaaagaatttcgatggcaatttggcgtcgggggaatctgaattatatgtaatagaacaaggctggctgcttatttgatctgttgtattgcttccatgcaatatttgcaatgaatacacacggaagccatcacagaaagccaaagggtcatcgggatggttgcaaagcaactcaatcctagtggactctacaaatatgtcagcatatctagcccaataaaatatcggcttagtacttcgtgggttggagattactgttagccattaaagaataaaatcttatttcattatgcccaaatattacaagtacagctttcaaaagtaggtcgaatatctcagccgtctatctggactagtgacgacaccgcataatttaatttgagcgccacatgccataacttcctattcaggcgactagggcttaccaatctaccacttaccctgcccaataaccacttttctcggatagtgtctgacatttggaagattttcccatagatgcgaaagaatgtgaacgacatgtgtcagtgcgcggaaatttgccccggatagccccacctggcataacttcctaatcgggtaagtatagttccactctcaatcgacttcagcaggtccgagaaatatcagctcacgaaagacaaattttctagtgaattatgctgacggggtgctttcaatctctgtaggaccgagcaaggattccatttcccgaatttgaattaataacggggtgaagtgagtaatatttaaaggccatatatcccctccgttttcattactcttttagtatcattcaacggactctcaaccactatcaatttccctctactttattcaaagcttaactcattcttccgactctttccattacactatgtgccaccaggaaattgacgccaatggctggaccagcatcgcggctgatgctggcgccatcttcggcgaccggccttttatcaataagccagactctctctctatcaccgatattaaatttccatttgatgatcctgtggtcgcgaagactttgaagtatgcaaagaaaaccctgcatcccggaaccttcaaccattcgatgagggtctacttctacggtatgttagatgttgcgcatagctctagtaataccaaacatcgcatctaacatctgcttagggatggccattaccaagcagcagttccccgagcgagctgctactctcaacccagcgacttgggccttgacatgtttgctgcacgatatcggcacggccgaggaaaacctgacggcaacccggatgtcttttgatctatatgggggcatcaaggccctctctgtccttaaggattttggcgccactgtagatcaggccgaggcagttgctgaggcaatcatccgacaccaggatatgggagtggatggaacgatcacatacattggtcaacttatccagttggccacgatttacgacaataccggtctccatccgcacgtcaagggttttgccgaaatgatccacgaaaccacccgcaggcagatcaatgaggcctatccacgcctcaagtggtctacagtcttctccggtgtcattcgcaaggaggagaatatcaagccctggtgccattccactcatcttgtcaactttagcaatgagattgaggccaacaccctcatgaagcagtgggagtgagaaccgaggactcaattcttattgatttatatttgagctttcgggtcacagtggctgcacctactagacatgtaaactttcaaacgaattcacctccgaaaattgagatgcacgagttcaatttgatacatggatcatttatattacgttgtattaaacatcaataaccccccaaaagcgggttttgacgtagctatacagcttcgtgtccagatcaagaatgtcatcattccgaacatagacttttccacctcaaaactccttgaggaacttctcgtaagtggggtacagattttctgcctttcataactaacgtcgatactagtttgataagagaaaatggatatttccctgatacggctgcgttgcgtagcctggtctgggataagaagtcaaaaaccctgtacatctaagcacacagtctttattttcaacgtgactacgcaagctagtactaatgatctctagttacttcgtcggataagacgggcaaacctaaagagatatttcccgacgttatgtggatagcacactttaagctcgccataccaaactcgaagaaatggctcaaaaatgaatgagatcaagatacctcaggatggaaatggtagtccgcgcagtaaattgttctaatcccttttcttatttcagttaggtaccagaaaatgcattcagaattttccctagtggaataagattcgcaatttgggggtgattctaggaagccttagaagttgagagacattctccgaaaataatggttgatctcctcaagcaccctaagttttatgcgctggcgtgatgcacaaaggtctctcgaccaaacaacatcgataagcgccgcccattccaagcaacgaacagttcatctagcgccgaccgtcccagtaaggagatttacaactcatgtggtacgtcagccaaatataagccgcatcttctaaataatcttagatcaatcccaggcgatgggagggattttatagatccatgcacggtgataagggtaaagagcgctaaaccgaaagggttagggctaaacctaagagcgtgatatacgatagatggaacaacctatccaatgaaaactaataaacatgcaaacagtaagcgagcaagcaaacatgaagcatatgataacgatctgtagtggatcgtcatataacccgcgaaaagacccatctagtctctagatgctgaaagactggcaatggcatttatggttgccattggccttcgaagaagaacgtggcgtggtcgaatgcagagagaaataataactgtcaagtggttgaataaacaaattttgaagaacttttgtataagttgaagatcaaaggaagaatttcggttccgaagtgagaatttaagcggtgcgtagatcggtgtcctgcttattcgaaagggggataatctagcttgttgaatcttgttgtggttgtcgtacacacgcgaagttgatcaataattgtattattatgtacgttggaatgatggtgcgaaggagctggcgagattgagaagttgacgttgaatctcggaaggtgatcttgcacgaatagcagcatccatgtgttgtacttagatgagcggtaaacttctaagggaagtattgaaatgttttggcggtatggaaatgaagaagtgggtttggtgttgaacttggacctgatatgtcttgacaagcttaaatatcaactagagctgctggatctcgctatgaggttgacgaaagtagtagcaaattcagcgcgaagctctgtacaattttgttggtattggtgatttattttgacgaagatcaagaggaggtagcgaggttcaaattttgcactggaaccgttgcctggaagtttcaaaaagaagaagaaaagtggattcagaattcaggattcaggaaagaagagaaaaaatcaggattctggatatggaggatctgagcagtctctcgcgcatggctggctgtaacgtctcggagcagtccaatctctagctcacaacctaaggtctgctgccggactgtccaaaagagaaaagatgcttcgagtgagtgagagcgtactcgcaatgagacctctgtgcagtgtacgaaagcgtgccagtacccaaaccacagggctgcgtagctgaggatcttaattgtcatatgcttacatttttgtgagcagtgggctactactgcgttattgggcggcagtttggtatatatgtcctcctttctgttgcttttatcacccagaacccgtgcatctttccacctgggcaagtatactcatttgcagtcgtgacttccaccctactctacgtctctgggacaaccagcacctggggacttgccctaaccagagagttgtaaagccacttgtgcctgcctatgatgaattgaaaggcttttgttaatttccctgtctgtctcccctcttctcttcttcttttcctcaactttctatactttctgcttaagttacagaaaaaacgacttatataatttgtttaactcctcctgcctcacgacaccgacgccgaaccctgaacccctctgtcgtaccagaaatggacgactctttgtaagtaaatcaaagatggccgcaagcaaactgctaacatctcatacagtccgcagaccgactgcgaagcgcggaccgaccgcgaagctaggtccccctctcccccctcatctgctaactatagtacagataccaccacctccccggtaaagcccgcggggtccatggggttctttgctgcagttggtgattcgtcgtcgtctgcgccgagttcgtcaagtcccacttccgacggcagcttcgctccgcgagttgacggacttacccaggtcattacggctatcggtctaacctttggacgtgaatcggggtcacccgatgagctatcctttggagatgatggcgggccggatcgaggggcggaagtgagtgttgcagcagaaacggtcaggcaagtccaattccttctgcggtatggtgattatgctggcatggtgtggaatgttttacgtaagatctcgcgactttccaacacgcctctgccagacaccgttgtcgcatttgatgccgaactcgacattggtgaagaagaccaggccgtcgaagaattgggagggccccctggggcctggcaaattctgaggcgactggtcgatcttctcaacaacagggaggggattcaaatcgacgagtctatggcaaggtcggcaatcaaggcgtacgcgttgcggaacaagctctgccacagcagcaaccttcgagataagtgtcccccggatatcgcccgcgatgccggggattgcgccacgaccggctggaccagatgtacgtcaaagacggagaggcaaagcgactgaaccaaccacggccgggccgggcaggttcagatcctttaccttacgtgccaacgatggaaccgacttactcgccatcgcgccgttaacgaacccgtcctagcggcacacggaacagcgcccctttttgcattcacaacgaaattcaaaggtaagtaagaggtaggtcaaggtaagtatggtaagtagcccctcccccccagcgaagagctcgtaccttatcgtggtgctggggcctagtaatcctttatggatgaagctaagacgagctcatatacagtatgtatctagtaacaaatatacttcatccgtatttgatgagcatgcgatccctttacttcttataagaatcaccgtttcttgattactgttttcttcgtagactgtgtttcccagtattgatttcaatcaccatgtaacttcggttgacgcctatttctaacattcttttagctcccagaaagatgcaaccaaatgtgaaacacaatgtttcatagaccgaagttcaaatacagcagtctgtgtttgcctttgccgatgaagatccgaatcttctgaatattacactcataaaaacccgaaacttaagtttctcaagcatatctgttgtttgatgctctttgtgtgtgttgctacggcgggtaaggctcatttatattagcatttcatgttaggcatttcattcacatagtggaaaggggacccgatctcaaaaaacagcaagtcaaatgatcttgaacaacagatcaagttatgtattgcctacgagccttcgatgctcgggtcattgcactgattctccgatgccacctagccatgtccgacggatctcgagtctggtcagtaatgtgcctggtggtgtgtcaagtaatagatctatgtacaaaaaagtgtgaccagagaaagtagtagaaggtagctcaccacaagcacaagctcttgtgacgtgccaggtcttccaaagataaaagggtgcattcaatacagaataactaagatggggagagaaagaagaagcaagttgcaaagtgggaggcagcctgttgatatagctgtccctttgcgaacattgcaaacctcgaacatctggcttagatatccagcaaacaatatatctaatgcaaatagtaagcaagcaagcaaacgagcgcgcaagcaaacatgaagcatatgatagcgacctgtagtggatcgtgacaactcttggtaaagagacaacagatacaggtcgttctcgccggtagacggggcggcagcgggatgtgaaaggacttggtgactgggaggaaatgtttcaagctgtagccttgaaaggctcatgggctcagttttcataggctgcagactccggatctcacagctcataactcaacctccagcttatctcgttcatgtcgctttagctcggcagaacgcatggcctgcaataccgtatagtggtagaccggaatgattaggcatggaccggggggataaccgtgatcacgaatgtctggacgatggcggctccgaaacggcacaggctgccccgggaatctttcatcaaaccagtcctttatcacaccgctccgcgttagtcctactgtttgctctcgaagtagagggtagggatagaaagtattgaatgtgatgtttttgccgttcggtatgagtttcaaagtgtcgacgaccctgacaacacagtcccacagctctaactcttcgctggggcacagtaaacagaagtagttgacgtgaatccacggcccacatttctggaatctccagcttggaaaatttcggacaagtcgaagaacatcatcaaggtagctcaatcccatgaatttgacccccattagttttcccgcaccctttgccgccttcacgatagcgtggaattctggtattcttcctccttcaggcgagcaacgaattacgatagtaagagagaggacgcgacgttcgtatagaatatgagttgtctcctcgttgaggtatcgattgcaagaaaggatggatagaccacagggtgtgctggacgtgttccacaagaaatcatcgaagagacagttccagatctggaagcgtagctctggtggtagctttgaaaattcgccgagtcgggcgaaaagtggaggtttggactcctctcgggagcaatcttggttcatcttgcttggtgtttgacttgaaatgaggtgatgacgaagaaagaagatgaaagcaaatagagatgagacttatccatggatcgatgagttccgacgcccagctctgactggcccgatgccgaattaggctgtactagtgatctcgacggcctaaggcctccaaatagtcgttgcagagtgattctgacttccaatgctacgcaaagccccctcttgcatattcatttcagtaccgccttcctaattaggtacatttccctgcctcaacaccccacatgcctttattgcggagcgaagcgaaacaagtataaatcagaaggtcttacgtacgtgtcacgtggccaagttttctctcaggggggctgaattatgacaaaagcaggggagttgatctagccgagggtcgctgtgaagccaataagccagtaagaggggggctttgcgcagcattaaagttagaatcagtcgcttcgctctgcaacgactatctggaggccctaggccgtcgagatcactagtacccccatatagtagcaagacagcaggtacctacaatttgtatgtaaaccactaacaaaattaagtcacttttatcaccacatctacttcatcgtcaacaactgctccaacaactgcttcaacaaacttcagaacttcaatatgtgctccaaaactgctccaaaattgctctatcgtcatcaggattaaaacatgtaggtatgagataaaatacgcatttctaattctttctaatcaaaatgtagggttttttgagtatgtaaacagcgcctgtgaattactgcctttttgggttagcgccccaatacgctccgctcctgatcacaaaatgagttagaacatgagctaccaaaatcaaataggagtgtccatgggcatgggtatatattggttgggagagttcttaagggaatattgctctataatcgtatgttatgtacgcacatattagaagggtctatagtgatacttgccttatgcttctcagtcatttagcgtcaacgatctgtctctcaactgtaccgttgcctcgaaggccttgtatgggccgagtccttttagggcatcgaggagtgacgctaggcagagcgctggatagttctataccgaagtattggactatttgttgtggttgtcaagttataatcaagtaaagtaaatagtcacgaagttacgaagtatgattgaagacgaatacataaactaaatatataagtgtctagatacatatatctgcgtttgggatagacgactagttagtggaacactagaatagttctattttgtgactgttggctaccggaaatccaggaaatagccatgccacctgctaggcacgtaatctgccaacttgctaaccagagaccaccagcacgagttcgcctgatttcccccattatccaaggagcagcccaggtagggcccaggtggccagcgcctcaaatatgacagacaagattctggcaatagcgatgtgcgtcgaactatagcctgccgacagtagccaagtgacagaactgtcaagcaaagcagataattgatcacgaagtacgcactcgcaagccgtgaaagctgtgccaagagaaatagttgacaaaggatggcgtatgcaagatggctgtatatgaagaacagcgtcggagaaacactcgcgaaatcgagatgaggccaattatcacatcttatagatgggacaatgagatctatgacctttttgtcaaacaagatgccaaggagcgccaaggagccaaggccagccatgcgggatattgagcttgtttcgaaccgtccctaatctactggatctgagcaaagggtcgaggtcaagtctacgttgatcgagctgtggcgcttgtactactctagatataattggcgtaggaggatgcatgcgattaccattatcagcagggtccatgggtgcacaaaccagccatatgggatatagaagaaaatgaaacgcccaatgtacgacagctagatatacatgaggtgaaaatggggaaataggagtcacatcgattgtgctttgccagtgcgtggaagagaaaatgggaacagacccactggccatatgagcgaaataaattagaaagtagaaactagaagttggaggctgagaggattctatccagaccccgttctctcgagcgctgcaggcgctccggggcaatacacttcggcagatgcaccaagtgcccccgctcgatccgtacgaagatcgcgtacagcagactggcaaggccaacagcaatcacactgataagggccggccacttgaactgttccggccgtgagaaaacgatcgtggagacataagagcaaatctcgaataggttctgccaagcagcttctatcgacgaaaaagagcctcgcgcctcggcttcaataccctgtaaagtcccatgaaagtcagggcctggctatatattgaaagaaggcattggcaaggccgtgaataactcacctcctgaataagaatctgtacacatagatcgaaccctcgcaagcctacccggctgagaattggatactctgaagagttacagcgatctatcatccctccctaatccatctcccccctctccctctcttccccctattcctatcatcttccttcctcttccttaaagtgtgctaaggcttatcagccaaaagaaattcctcgtcacttcgattattatgtttacaatctggatccttgaggtcactattacaatatcgggtagtgggttcttgagtatccgtggcttattagcctgacgcttctcattatctctatcatgcagacacaattgagttcccatttttttatcttactttgagttccagccaccaagcaaacttttttatcgtcagcactacgtattgcgcgtctcaattgggcctcggagggaagtaaggtgagttacgtgccttccagtgctgggagcacttggctaactccacccatctcagcagtttccctatcgaccagccatgactgtagtccatcacgacaacatggaaccttcatcagagcttattggctttgaggaagcgcctccgatcgagaatcctactatgccagttgctgatattccatggagccctccgcctattgatccattgccagaacttggggataccgagagagcaaagttgatcgacaaactaatagaaaaatcaaatgaaagtgaagcggactcaacatattgggcatgcctctggttgtccgatattgaatcccttcgagagattctccaggtggcggaatgctcccagacctatgcgtccctctccatgacaggcgcgaatactttcgccatgatcagggcttgtgagctacttccgtttttcatacccctttctaaccgacggaaggactgacattgaaactccttagggaaaacaaagccgaggatgatcgcagggctgcctgagacacaagggaagcgaaagttaggggaggagagcccgaagcgaaagttgaccgcaaaaacagctgtgagtcgtctaatttgcatggagtgaggaatgatctatgtactaataccttgactagtgtcttaagcgcgatgatttcagctgtgtgatcaccaatttcccccaggtagatgtggctcacatctacccactatccctgaagaaaagtcaatcatcgggaaacaataagaacactgacacgtacgacaagttctggaaaacgctatacatgttctggggcaaagaccaagtcgatcaatgggaagcccggttgacgggcccatgtggcacagagctttgcgagaatttgctttccttgtgccccaacgcccacaggctttggggggcttgttactttgccctccagccgctccatctgcgcgatgacggtaaggagttgatcacacgcttctactggcttcccgaggtcacgcgacagaaggttcaggtccaggccaaaccgagtatttcgcttcatcctcccgcagatttactcaatcttcgtgttgagaacactgatggatctgcgcacaagatgaattctggtgatctggtcattttccaaaccaaggatccagaaaacctaccattgccttcatgggatctcctccaaatgcaatggattctccatagaatcggtgcccttagtggagcagccaacgtccctatgaggccgtgggattgcgatagtgaggatgagggttccgacatggggctcgaagatgttttcgagccttaccaggatgaactttctgcgggtacggagtctgaagatactcttgaatcttgaacccgatgaagaagatacgcagttgccgccgattcttggccgtccgtctcgtttccagtcttccttcgagatcaacccaaatgcagacttccctcgccgacgatctccctccagtgagaagtctctacagaaaatagctattcttccttccgtcccgcatgctagaagctcccaaaacatcgcaccacataaccccacagacctagtgaaatccccgggtagaagtctcttatcattggacatgactcctaggaggtttgcttgtcgagggcaaaccatagcagtcgtaggataatgcttcttcgttttttttttctttcaaatttcacttcccttatttgaaagtcccatagcagcaacattttgaaattgaatctcattctggatgatctagctatcatccacactcaaaccccaaatatagacaagacaaattcggcgctgataaggatcgacctgatgatccatagtatccatctgatcatcagatgagaagcgatcaagaagaaatttttccctttcctcactcagttcatagccacgcgatcttatacaacatccgcattctagagtgcagtgtcccataccaagcgccccggctgaactatttgcacattgagcatcaagacaacatccacaatcacgaccacaacaaccgtttctagacttgcagtcttcaacaagaattggatgcatataccacaaaggattggatctccataactcaaattcccgttgtaagggcctggaattaccaatgatccagccacgggtataccaccaggctcgtgtcagcatccaattctcttggtagagtgtgctcgtctcgtcctcaaagcttggaacgccagtgccccagaaactcggattatggttttccttggttactggtgtctttgtgaagctgttatcttcaagcaagctaatatatatctttaaagctacaactagttcgagagataactcgaagcccacccgatgttgactgtatattccagcccgaagggctcgaatcgtgggagcaggactctcggtatgcgcccacgcctgggttctttcatagcccttacgacacacggtccacgtacagcccctcccctttgtatgcggtcgataatggcaataatgcggcaagccaatcatgaccggaaaatctcgaattacttcagttttttcagtaggatgaggattgtacttacaatgaagaaccgccaacctatatctattatctcatagagtggcgggtcaaggtcaataaccgaatcgtatcgaaggataccgatgaagacctcgtgttagctctaagagactactggcagcagttcttggaaaaggaactgtatgatctccttggatgtaaagttccccgtgaccgaagggtaagaggtgaggatacttccattgttatatccgtaagggatcgttcttaccaatcgctatgacaaaaccgatattaactagacaattatcgaccggcaactccagaagtagtcagttctgttttattaggacaaggagctgacattgaagataggtaatacagcagctcagattgacgagctggcggatgcaagaactgcttctagtatttagctagttggttggcttcccgctataatatcagactacctcaaaatttgatagttgtcgtgtcctatatggaaaaggccgagctctgaaatggaggttgtcacacgagtatcctgcgccagctagcacctttctggacaaaccgatccaaagttacgggatctatggtcatcgcgcaatcggaaaaatgaaagtcgcggttgtctgggtcgcccttagcaggaaaaatggattaggtaccttttctcccgcgccccattcggattctttgattgggatgaagaagagggctttttaaatcgatggtgacttaatgatcagattatgccagtcccaacagacatataggcaagatgtcagaagagtgcgcatatttgtttgaagcagaatcatttctagaacctccggtgttttcaaggctggaggagtcaaggtcgacacaatgaaggccttcctggccgctgatctcgtggccggtgccatttcgcgatgcaggacgatattatcaacagatgaccgggaactataggagagctctgaggggcaactgcattaaggcgatatctaggcgctatcggcagcagaccctcactagtgatgaccgtaataatggaaaggtgcttccacaatcataaaaaacaagattgtcggccgccccagggcgtcctataaatcttttaacgatgctgtacttagatatgaatgaattaatccaaaagataaaggtgaccaacgtagcaaaaattcccgactccgactggtggtcatataattgcaaatctctaagggtataatgctgtttaagtgacagaaacaatcagagattctatatgacagttgattcaacgaagttaatcaaattaaatgattctagtatagctatttataatagagatgttatacctgctgtaaggaattgaaaaagtagtatatatgcttataataaaaatgctattaatttaattcctattaaaagcaaatatgtaatgaaattaattaaagcttactttaatttatatcatttacaactagaatctttattaagaaaaaatagattacgtcgtagatttagaaaaatatctacaagtagaatatttattagtgatggtgaatttaaacatactaatgataaagtaaatataacattatatgtttataataaacaaaaacttaattttttattaaaacttaaaaaaagatatttaacattatttaaaaaagctaaatttgctagaaaattaaaattaataaaaaatgtaggattaaatattttgtgtaaacatcaacaaaaaagtatattattaagtaatcttttacctaaatataatactcaagtaaatacagcacaaaatatttattattcaagatttattaaaaaaagttttaaaagattaagattctacatgtatttaaagaggtctgaatgaggttgtagagaaatgaggtggaaaggagtacggattttgatggggtatgacgggcagaactacccgtaggcggtaggaagcgattagccaataagacaacacaaaacagcccaaaggcggtctaaacaccatagtctttaacaaactcgtgcaagcccattcacccatgagtggtgagtgacatgagtgatataggtatgacccatgaattattttaaccagcatatattgaagaggtagtgatcttaatggtcataaaatcaatttccggactctctaaatctatacatatcgtctgttcgtctacagagattgatctaaatgtaagactaaaatctctgtatttacacagaagggattctgccatgccgccgcaagatcgtgttcatgtcacgcgtgtgccgatttttgtttctctgcctccacgccagtctcctcttcttcaccagatgttgtaattgcagcaggctgctacgctcggtgcccttgactaggcatcaagcttttgtgaggggattccaaccagaaactctacccctcagccacaccaaaaagattgtcgcgaccatgaagttcacgccactgaacaaggccgcaaagcggaaagagcccccatctgtctctgcaattgcaccagcaatcggagggctcgtaagggtaccaatgcctgcgatagcaagagccagcccgattcgaaacccgatctcctgaggtgggtagagagtcatcagaaggggcggtgtcaagccaatggtggtgccagatccgataccaaacaaagcggcgaagacaatgttggccgcgttactgcgaccaggcaaccataaggccagagtgatgacaccagtgaaaaggagcatgatgataagcacattgaaacggccgtacttgtcggcaaggccattgggaatcgtacgtccaaaaaagctcgctccgttcatgatgggaatcagattgtaggccatagttattgacattccgttatgcatagcagacaggacaaggtagtcgaaagggacaaacaatccccctaaaccctggttagctgtgttgcgatgaaacataatgataggcggctcacagtaaaggaaaaagcagaacgtcaacaagatcaagaagttgaattccgtgaaaggccgaaggtagttcgcaaggttgaactccttgcgagtgtgaggcaagttggaggagatggtgagcatggcaatagcccagagcccaaggatcaagaaagcgcagattcgcatcgtccatgcaaagccgacctccgaaaggaggttgttgaccataaggggaaatattacaccacccagactcgagcctgcaacggtcaatcctcctgccaaagcgcggcgctttctgaagtaagtcataggctgcgaagcttgtcaaagaatgcgcgataagttccaagagtgatcacacaaaccgaagtcattgccggagtgaaaatgagcgatgtgccgattcccgagcaaatcgactgtgccaagtagaattggtagtatttgcttgacaagctggtcatcatgaggccaaacacatgcatcaatccaccgatacagatcggcaatcgtggtccatagttgtcgaatagatatccagacaacggtgacatgaacagcatgaagaaaactagattgaaatgagcttgttgtttcacggccggttggggaagaaggctctcacattcggacgaagtgatccaggacacctccgagctgctataggttttcaactggttggtctgatattcagcttggaacagagcaatgcaattgacccatccaaatgagatgaaaagacccaaggagcctccgagtagcgataagaaggcatttatgcctccttcaggtgctgctggtggggcagatgcttgaggcttgggctccgctggactcgatggtctcgaagaggttggactgcccttttcgagctcagcagtacggtcgtcgtgcatagttgctgtggggtgcttgatagggcgcgcaaaagatagttgtgcttgtgatgtcgattggaataacgagtccgattctaaagaatatggccagtactatatacctctggcacgaggccaagttctgcgtatgaaaggaggtcggatatacatgctgtagctagcaatgcccgatttcgagtaaaagatcggacgtccgatgttgttcgttggtgatatacgcaaaggcgctgctgcacacccgaggccgagtccgcggccgagctattcaaaaggaaagccgaccccggtcggcctcggagttccggactcggcttggatgtttttacctataaacattcgtcgtccacctgcgaggttttaaggaatcattcaacaacaaatcatggactatcctcctcgccgattcagtcgatttcatgccagacaagtctttgctcgagccaactttccgctgcgagcatacggacccagaagagggatggcgcttctcaagatcggtctgttcggcactgttggctacttcgtcgcgaagaagcttcttcggtaagtcggtactcccaagacactatggtcaagtcgagaattatcaactgacgtctatcagagactcgaatgagccacgtcaaaatcctcaacaatgtgcatcgtgcggacatgagcggcagcaagaatccaggcagcaaccgacgaacgttcgacggacgccataccattagcattttgcagttatcagccatgatgccagtcagcctcaacaatcagctatttcctaggttcagtagtcaacaggcatacttcgacggctcgggcggtggtgacggaagcaatggatataagacgttggggtgggcttcgacttactcaagattctataaggcaaattgggactgttaggtatcgttgacaacctattgttctggcgctttcttttcatagaagatagaggaagagagtactctaatgactatttttatcttaccgcctaacgaagatattcaactttgaagattgtcgtccttatggtccgaaattcccaaataatattagcgtatatccatgtggtcgaaagctctcagacaggtcagtgttgtagtcgaaaattctcagattagactctatataactagggaattcagggtaaatagtgtcgctagggccgattttggcatacctttcttcccacggaccctataaccaataacggctctgtcggcggcgccataatcgcgcaagacggaaaggagacctggacagtccacgattatttaggctctgactacaatgcagccgatttaaccgtcgagaagacagtcgcccagttccttggcggtatgggctcacccaacccgatttctattgatgaagtaactgcaacctccatcttcacgccgacagtagttctcgccgaaacgtggagcggaaatcatcagcgcgtcttccttgccggagatgcttgtcatcagacaattcctttgggcggctacggaatgaatatgggccttgctgatgcttgggatcttggctggagactcccagccactattcaaggctggggtggcactcacttgatgaagacatacgaacaggaacgtcgtcctgtggcagcgctgatgcaacactggcgcaaaatccacatgatgaaaattatggggctttcaacagctgtaaaattggatccggtcgtcatcgaatccatggatgagcgcggcatagccctgcgtgaggaaatcaatcagtacattcagcaaaacgatgaccataatcagagcttcggcgttgaaatcagacagcactacgagtcgagtctggcagtactgagcgagcaggtagatgttgaaaaggcagcatcacagttcgactcacgcaactacatcccaactacctttcctggttcgcgggtaccgcatgtggctttgtctgacggcagcgccatttccgatagattcgggaaaggcttcaccatggtcgcttttctgcagaaagaagcagtagcagccggagaccaatttcaggtgcccatcgcactggccagttttgaagaagcagcacggcagcacagtattcctttaacgagcctttgtttgatgaatgagactcatgcgttccgaatttgggatgcttgtcttctcctcgtgcggcctgatggattttcagcgtggcgctcagatagtctggacaaagtgcacaatgcatcacaagtgttgcttcaagcaacagctcatacctcacctttgtaagcaaacccctccgagacagacgatcggacatagaacagaatagaaagaattaacctcaattaatcacgatcttcatttcgcaacgtaaatcgtcctgtggacttgctctatcaaatagttggaaccaaaaaggccgaaaagtccaagtagtcggagtcctgacttcagtcagtagtgctatgtaagaggcgcatatttggtaatttgtactcaccattgcgccaaaatccaggccgttaagaagctcattatcgatcacgtcttgcgacacttctcggggagtgttggcggccctgtaggactgtagtacatcgtaacactccttcatgctgtcttttgcagtgttcagcacagcagacaaaatgggttggccgcgttccatggcgtgtatctgggaaagaatgccagcaagaaagatgtagcgtttcaacgtaggatggcccaactttacgatctgcagtaattgttcgttgatgtgttccaaaagtcggatgatgggcgctcgctggccgcgcgccagttcagcgagaggatcaaggaccaatgtgtggttgagaccaatcgaagcagataacggaccaaaacccgtttcctccagctgagacacaacctccaagcccaagactgaaattacgtccaggctcaaaggtccgcgaaatgaccctgtgctcatcaccatcaacttggaaagatcgtcaagagagtctgtaggtagctgaagtcgctcggcataagtggcgataatcattgcagactcctgacaaaccctccgggaaaaatagaagcggggatccttttgcgcttgtagcatgaaaggccgatgcagaaccagaatataccgacgaatctgcatatcaaggaaagcgtgatgcatgcttaggaattgcgaccaatgcgatcgacaatagcttgcaagagtacggcaaactgtctgaagtttcgtagctagctcaatggccatttcgtatgagtgctctaatcgctcgttttggaccgccctgacaacttcaagtcgtatcggcagggactgacgcatgagaatttgtatcgacgattccgtatagcttgtcaacggttctggagatggagactctttgctggctgaatctaaatcagcatcgctgacattaagaggcatatgatcgtcaaaatcgtttgaagaaagaagcaaagggatggaactgtccatggaaccatggattacgagctctaggactgttgtccaaagcctgcttcgtatcccggcttgaaaaggagacagagaaaacagttgtggatctcgatgcaggcccatagccatagccacccgaagtagaccactttccgacagccacggtgaacggccgactaatgttatctgccgcgaaaccaatagaagacagaaaatttgaattccatcaagattgttggtagttttctctgacggtccaaccatccagtattgagcagcttgtatccaagtacgccgcgagcgctgtagaactttgtcgtcgtcgttgctgaagacgcttccaatggccaacaccaaacccaacttgattgcaaagtttgtaactacaggctgcggctggctgaagtattgttcgtattctgcccagaatgtgggaatgtgaaaacaacgatagatcaactcgaaagtccgcatgtagtgattcactagtcggtcacagatggaacgagtcggcattgtactcaaaagttgaggaacggggtcatccatctgcggtgcctgctcatttttcatcgtgagtcgcaagttgcgtatctcattcacggaatcggccagctcggccttggtatccacgaaggtcaattcaacgtcactgtctccaacatggctgactctgaactattgacacatcagccaatgttcaactagtcaaggtgttcattagaaaggtgcttcaacgataccttctcagcattgtgcagccagtggcttgaaggaaatagttttaccttcttctggttgtgacgaagtcgagggatgacagacggaattgttagagacttatcgcccgtgacagctgaaggcgcaggacgagcttgggtgagctcagcaagccgctgctcgacgtgttggaggcgatcagacaatgccagcagcgtgagatgattgttgctgctgctgctgctgctgaggctgtgctgctggggatcgacttctggtacaaccgagtgctcaagctgctgtacacgtcgctctacgctccgaattcgctcagattcattcgttgttcgttgcctctttgcagggtgatcgatgttgttatttggggcaatgctgagtgagcgagaaacttgttgttggacagtattgccctcgcttccacggtcttccagggcgagactgggttgctgctgatctccttgatatgtgcacgtcaccgattttctggagacttgacaggctgaacatggcgatttaagatcgcaacgtacttttcggcggcggcacgggtcgcaggattgcacaggtcggcggctccgacgagcgggtgaagatgctaaccgggtactgccaaagctctggtcctcagccatcttgacgacagtccaaattgcaggtattgaatgcgcggtcaacggacatcaatgatgttggaaaggtcagagggaaagctcggggtcggcaagctgctgaagtgaggcgctgtacgggcgactaagtgccatcggaatataaccccctcatcggataatattgccaagcagtattttagatccgcccccagctgtgtaatcaggctctcccacttctgtgtctactctctcattctctctttttctctctttttacaactactcgaacggagtacggagtacggagtacgtcggaaactaactattagtaatattgaagcctagacatgcatcattatacccgaataccatgcctgaatatttgccggtaggaaatgaaaggacaatgcgctagtcctaatctagttaaatttaaattcattctataattgcttcgcttagctccgcaataattgaaaattaatgcttcatgactatttagttaaataactagttaatctatttatacttgaattatgaagtatactactctgaaagcttaccggatccgtcaatatgaagctattcggagatacaccaataacgaagacttccaatttcaaaactgtatttaaatgctggatagtagacagcattgaattaaatgaatgcgccaggtaactaattattgcggagcgaagcgaagcaattaaatcataacctcgtgtatgtatatcacgtgatcaggtatttttatcctatgggctccaaaatcattgaaactatgtcacgtgaagtattgtcggctaactttggcagaataaatagactaggcctaacggacatgtcccgagggtccatgcctggagaatgaacgaaccatcattatcttccccagagcttctacagtcacactttacgtagcattagaagttagaatcagtcattttgctctgaaacgactatccggcggccgcaggccgtccagatccctcgtaattatggtgtagaaattggtacggagcactccatatagatgaagctattcagagatcactatagagtacataatgcaaatggcttccaccaccactaccaataatagagatattccaattctgaaaattgcatttaaatgctaagtagtggtaagtattgaatttataaagtgtgtctggtaattaatcatagtcatggtgtaattgtacgaaggaggatgaataacagagctctcgacacaaatcctggaattgggcgaaagcgaagggcctgctctgagaaggcggtggttgatgacggtgagctattgtccaatgagagagctatgttccgatggcacacttagtcgcccgtagtgctgtcccatcttgctctcggactcggagctcggacataaagcccactcctctaaacgttcgccacccaccgaccaattcaacctcctcagtacaggtattttcatacagccctagtcgtccccgtcaagggcgttgacacctttgtctgcgaacgggtggaaagctttcgtactgcgtcggagaggactgatgccaaaatccttccagttgatgttccaacgaaaagctgattcattgctccacacaaggcatcgcgcctatatctttgcatgaagtgactacctgggcaagtgatttgctcgtaaaagttatatgaccgtggacctaggctgacaatcagttctgttgagttacaaggttgaaagcaagtaatacagcatataaatgatccactagatactaacggcagggagcaaatgtttgtatgcaataatggatgattggaattgcctaattctaggagtatatctgggcatgttgaagctttggataggtagtatagagttttcacgcagtggatcgctatataaacccaccaataaacgtatatcgattttcctgtactaaggacgggccaaacttcgaggtaaagaatggacgcatttactatgaaggcaaggcaattgaaattagggctaattgccatgaactatgagttcagcagtctcagcgaattcgcctaaaacaattatcgtacgcgtagatgaaagagaatttgtgattacatattttggatctttgatagaattcaaagtggttatggattagtaccgatatgttctatggagtttacaaaacgcgcgaaaatgacagttctttattcagctatgttagcgagccatccgtttcggaggaacttatgcattcttggccggttgggcagcatccaacattcaaaagacccatgagcgtactttgtcgcagactactcattcattgcctttgcctcttcgttttttttttggatcgtaggagacgtgtctatcacctcgtttaaaacttaagagagtaaagcatctagaatactggatatttatgcatttgtatgtacctgaatagccgcaattatgaacttggagggcttagcatagtaaaccactaagaaaacaggcgatacatgcatttctacggtagaaatagcatcatattgacgtactgatcatttataatacgccataaagagcggtgtggtaggctaccataggcggaaccatttcaggcactcgggcactaaactacttcccaaagggggcttacagggggttgggaccctggcactcataccgcttcgtagtgcggtccctacaaacttggtagatccagggacgtagagaaccagagattttatatcagatgagactggcagtatcgcactatctttgatagtggtgatgggtttatcaactccccatcttgagaaacgagaagtgaaggctcagccaatgatgatttcgacgatttttcccgcggcaaacacgcaatctttgccgtcccagtcggtcaagggcggagcggcatagcagtacagtatcctccccggcctgaatatttcacatccttcgtgaaaaaaaccagacgaacacaagcccaggccccgaaatgatcggctccggacttctgagtagtgagctggtagatcgagaagaaggagggcgtctatagacacggagtctcgatttggctcataatcatgcaccttgaaatcaatcacttgatcagcctccatgtcaacaacagaaccatgagtgtcagattgcgtcgatccggagtcctttgaccactggtaaacccaatatctaccgcggacaccctgatcggtgatcaggacatcccggccccagtgcatcggctcctggagtttctgtcccagcatggctcgcggaagacatctgaatccaggagttgacaacttggggtattccagcagaaccacgtccttgggaacagtgccaagttgcagccagaaattcttcactcgatcctcgccggacatgtgaacaagctgggagacgtcgactccgagaagaggagcaatcgcaagcagttcgtcttccggcctcgaggaatcgcgtaggcacagcatctgagagacctgtttcatgcgaaactccacgttcgtaagggagggaagactccggaactctcgcagcataagtgtctcgatgctgttggagggtcgcgtgcggcagctctgatctaaccgctggacctcgtcaaaagagagccctgtcaattgcgacaggccatgtagcctttcatcgtcaattggttcgtctgttccgtctagtacatcccgaaaaagtgatgaaacctccgcgagacctgcaggaaacaagatatacaggctttttgatagaatggcttcttgcaaggtccacaagcgccgtgaccaggcacaggtcataagccgaaacataatcgagaacccagtcaggttgtccggagtgctatacaagccattgtccagtacgatagtcatcgaagcttcagaatacacctgtctcatcttggtaatggccattttccgcaaccgtgaatccgctggaatacataacgcatcgatccagaggtaccatggcacctgagcggattcagaatgcaaagagctctgtgccgaggcacaggcgagaccagcgagatgctgaatctggcaccctggaaggcccgtttccgaggttcccatcagaccgtcggaccagacatgggagatggcagcgaatttcattccttcctgatatttgctcaccgcgctatatctcatgcgatccctctgtgagtcggaaataccgggcatgagagctaactgtaaacgtcgcatatcaatcaccggaaagccaccaccgtcgaccgcggcaataatttgatggagacccggggccacactttcacacttacagtccggctggcgatgcttggccttcgcggtatccacatccaagttgtggcctatgcacctctcttccgaacacgcctcgtgtctctcagtcggcccgtctgtggcagggaagatgcaagcatattcgagaaggtgtaaacttccggatattgagccgaaggtattatacatggatggacaccatccttgactcagcaatcgaccgcgcagctgctcctccatgcctggtgttcgcatagacatgagggtttgcatcggcctcctctcatacagcactgggggcgcgatagaaatcatatgctcgagcaaaagcagcgatccccgaactatatggtcaagcgcagtttccgtgctttcgggaagagacacttcgccggataaactgctttttgccagcgctcccagtccaaacaggatggcttccgctttcacacgcgtgtcgtcccactgatctcgccactgtgaaattggccatccgaccccactcagccgcaactcccaggagactttcagacccctgagaatcttcgtgtcaatgacctttccttgaggagtatccctcagactcgctgagaaggaatcgaacaaagcagattcaatcacaccgaagaacaaccaggactgaaccatgggtagtgcttcgtctggatcggagaggatccattcgataacattccgcgccggcagacagttgcgtacctcaaggtactccctgaatggaaccacagggtatctttgagccgagtcatgatttccgccaaaccaagggatatactgtattgcatccccgtattgctgcctctcctgttgggtcaggaaatagtccatagtaagatatttgtgatgtagcgaacagtgccttgcgtattgacaggatggcaccgctcccgatgttctagtttgaagctgtaagagtgcagttccgaataggacgagctttggttgattggacggcctatgaatgatgagtgaatagaactcatcgtaagtcctttttgtaacgcttaaatatgtatgtctctgggtacgctttttggatcgaaatccctgaaagtttacagtatgtaacagccaaatcagcatagaacaagtcgagatttctgatctaattggggcaccatgtcaacaaagttacaataccaatattttaataccggctgcagcatcggcttggagttagtcaacgagggtattgggcatcgctgccaactcattcctcttgaggctgaaagtgcggggtttcgcccgtttcaccacaacacccgggtatttccaccaccttcttctacgtaagtggatattttatagtcaatggccgcagatcaccacccaggcccaatatccttggaatccgggtggatattgtaaccccaaactttcagtagtgggggcagtcagaaacttggagctagggttatgtatgaggcgtgcatttgtgcccagcgatcaaggtcggctgtgccccccagtcagcgtcgttctaaaggctcgttgtgcagtctcacagcccctcgacttctcggtgggaagcaaaatccatggatataaagagcgatgcgccattaaatatctacattccttttgcaggtgattttttctaccaacatcgtctctcgacacttggtcaaaactttcccataaccagatgcccatcacccttaccacggcggcccattgcccccgcaaatgggaaaccccgaaggtatccactgctgaagagctattcaaacgctcatgtccgaaggaccatgagcgcagccggaaattgatacagagttcgtttcagccaagtctttttcgcacgtctcatgtctctgcctctcgacatggcttcgtctgggccgtgtttctagcctacagcgatcaccataacctgataatacggcccgaagatgtgtggttctccattctgacacaactcagtttctttgtgaacgcacatgcagaggagctgcgatcttttttcgtttcacacgagggacaaaaagctcttgaagtcattgaagtgggaactatccactccgctgactttggtgcgttggccttacgaatgaccaggctgattgagaaaagtgtggtggacgaggagttgcgaacctggatcatgccagactttagcacctcaacagaatccgacaatgtggtcgcagctattttgatgatgggcgctctacagaagtacttttcgttcaaagtttcattgacatgcggaattccgtctgtcacattgttaggcgagcgaaaggactgggaaaatattgtgaagaaacttgagaagctatatcagctaggggacgagcctgcacggtttgctcagcttcttcggccgatcctgaatcatttcgttgcttcttttgacactccaaactcacctgatgtactgagtttctggagcagatgtgcccacaagcactctatgggcagtggaccagactatttatgtggctgggtttcagctttctgtttctggggtgaagatggaaagttattatgcgcggaatccatccattcctcctcctccccaaatttccagacacagaacactgaatgggggttggatgctgttttgtcacgtcgcatcgatacagatgatgtcccgtctggtttcgcctccgtgccggttactatcgacgacaatggggtagtttatgacgctgttatgttagctggactgatcggtatccaagccacatccagcggagcaatgttggatggtactagagatcacaacgacagtggtgtgtttcaatacaacgcaagcggccagctggaaccgatcgtttatagcatttctcctccgactgaggaagctgcacttgactccatacagccgttgtcaggatggtggatccatgaaaagaagcgtgcgaaggagacagaagaccgcaccgtggaaaaaaaggaattgcgaaccacagaccgggctctcggggccctcgacgcagtagctcttcggaaattcactaggattgggagttggaaaaggtccccggacttgaagaacttagcattctgatctaagcgatgaagtctgacagcgtgaggaataagcttatgaggtatagtcatttatttggtgggagagtctccagtacggttctctcttcacaatcaaggcttcaacaccggaatagaatagaattgagaatttcgtcaaatgagtgattaccatggtagactcaggccaaataaaatagtacttacaagtgaagccacccggggcgtgatgccttacgtgcgatgcgcttattgagagccctctagaaatctttacagacggctggggtttaaagaataccaccaatggtcctactggtgtgaatctttatgaactattcacgcactgttccaatgtgcactttggatactctgcgtacaagtatgctccttagatattccttctcatataacccaagagccactgagcgcagcttctccaatcaaacttggagcggtgctgatttgaatcgaattctcgctgctatgaagttgccaaacaccgggcagatattcctgatatgcattgggaactagagagttttattgaatgatgttgttcttgtcaacgttctctgagatggaagagctgctttggtgctagcactcctctgagatggacgtaatggagccttgttggccttgggcggaaaggaagaacgtttgaagggatcgacagcctgtttttaccacgtggggacatgcctgaaaagaactgtgataggaaccaatctagagggatgaatattcgaagggaacagacaaggtttcaccaagcggtgtcggcaggaaaagcatattactgcagctgcatccatattagctagcgtcgtcagatacgctcagacccatagaactttggaagccgacaggataagtttaccatccgcaccctgctggatttattggttgctgctccattccagagctttcgacatgggacattgacaagttgacagttctctgactggtaaagatatactgtaatcaagccttgaaaccttggaacatgtatagacttccatggatctaggtagccatgtggacgagtcactaaacacctttttcaaagttcaatgcccttatctagtcctataactgcgctgagcaaacctgctgacgaattagggctgagacaatctgattagtctattaaactaagtaatccgatccggttgaactcggttctaaattgagctaagcgctattagctagggtctataaggctctcgcacggagtgctgggccgaaacagatttgcagtcccgctgcatagggatgattctcctgaaagggtgtagagccaatgcgcctgtatgcgcgtaggttaataatataaaatatattgataaaccatctacaaactatagaccagccgatagacatcgtaggtgtgagcctttaggctagcgtcatactaaatgaaactgttgtctcatttcgagcggcatggtcggggctagggggaaacagggccggatgaaaggcagctcggattgcaatcgcaggatcgcagaagaggcaaagagtcacacgggaaacagggggtggcggagcttaggagctcagtgatccgggtcaatggcgaaaatgcctcaactgcgaggggtaggagaaagaaggcgaaaaagaaaattggggctgttggatggagagggggagagcatggggactatatagaaccacgcacggggaggcataaggacaaagagcgctaaacctaaggggtcgaaactaaacctaagagagtaattcgcagtcctcatccgatatggtgtagtggctaacatcgccgtctctcacacggcagccgggggttcgattccccctatcggagtttcttttttgattcttttcttttttttccttgtctttatatcctagaaatgttagaaatgaaaacagttggtggaattggcatctcgttccaatcatttttggttcgaacaagaaactatatcagagtgccaaggcatattaacaaaacaaaacagagtaaaatacactcatacttgtcagatatatatcaaccatcaaccgagtgaatccagatatatttactccgtggagcaacttgcttcagtcgcatgatttgcgatgatctgcgcgtagaccgagattgttggaatatttaatccctagcagtcgaggatgttccttcggttgttgtggccgagaacaagggtctgaaggaaatgcgagaactgttcttgaagactcaatggtttggagacatggagcggaaatgtacaaagacaaagaacataaatccatacatagacgcatacgtaaacgtatttccgagtgatctctacttacttgcttgggtggacaataaggtctgcgagtaggactgggcctgggacaaatatcgggctagacgcaataaattccaccacataagtgcacattactatagtcaattgcaacggtcctttcgagctgtgcagcatgtgtatttcacgaaaacaagaagaagattacatggatgatgtgttttgctagccgagctagtctaggttagctaaaagtggtacatggtgataggatatatgagatctgaagatttagaagtgaatggccttagagtaggtggccatggcagcctccttgaaggcttcggagagagtggggtgggcgtggcaagtgcgggcaatgtcctcggaggaagcaccgtactcgatggcgagggtggcctcagcaatcatctcaccggcaccggggccgatgatgtggacaccgagaatgcggtcggtctcggcatcggcgatgaacttaacaagaccctcggtgtcgaggttggtcttggcgcgggagttggcgctgaaggggaaggtaccgacattgtacttgacaccggaagccttaatctcagcctcagtctggccaacccaagcgacctcggggtgggtgtacatgacgctggggatggcagcgtagttgacgtggccgtagccggtcttgatatattcgatggcggcaacggcctcctcctcggccttgtgggccagcatgggaccgaaggtgcagtcaccaatgacacggacgtggggaagcttcgtgcggtactcctggtcgataatcaggcggccacgctcatccttctcgattccaacctgctccaagttcaggccatcggtgtagggacgacggccaatagcgaccaggacaacgtcggcgtccaatgtctcctccttgccacccttggcagcctcaactttgagggaaatagtagaaccactgtcatcgccggacatgaccttggtgttggtcttgaatttaataccctgcttgccaaggatcttctgggcctgcttggagatctcggcgtccatgccggggccaccgatctggccgaggaactcaacaacagtgacctcagcgccgagacgggaccatacggaagcctataccacaatgttagcacgatctagcattcgaaactcattccgtagttaatacataccatctcaagaccgatgataccaccgccgatgacggtcatcttcttggggacctcagcgagagccaaagcaccagtgcttgagacaatgcgcttctcatcaatgttcaaaccggggaagccggtggcttcagagccggtggcgatgatgatgttcttagcacgcagggtcttctcaccaccgtcgttgaggacgaccttaacagtgttggcatcaacaaaagaaccggtacccttgatgtactcggcgccgttcttcttcagcaggaactcaacacccttagtcaggccttcaacagctgtgtccttggccttcatcatctgggtaaggttgagcttgacatcgccaacgtcaataccacgctttttggtatcgtgaaggacctggtggtagagatgggagttgttgaggagagacttagaagggatacagccgacgttcaaacaggtaccgccgagtgttccgcgcttctcgatacatgcggtctgccagggtgttcagttagtatgcggattgcgacggcaagaccgacctaatcaaaaattggaaagcctagggagaagtggttcttaccttgagaccctcttgaccggccttgatagcagcaacgtaaccggcgacaccaccaccgatgatgaccaggtcgtgatctattgctcgggaaagcggatatcagcaatcgcgtccggcaagaaaacagaacctctccgggtactccgggaactccgtgatggcgatgtgagcatcgacttacctgcttcagaagcgaaaccacgttttgagtggccaatgaagatcatgggagtaacgaaattgttgggaatagccctggagccggcatggcggaaggcagaccggggcgaagcccggggcaagacggcgcggaacataacgaaaagaagggacgaaaagattagtagtctttagatataaatgcaatcctcgatgtaggcggattggagttgttgggagtgcgcaaatagggtggtggtttagagcacgggaaatgactgagcttttgcggtattgcttggcctcaccgcctactacggaccatgccgcaaagctggcccgtattaccaaggcggtaagacgggccggcaccttgacggatgatctcgggatccgttcccgatgattctgcgggcagaatatctgacataggaatcgcccagacattttgattgaacttaatacgatgctaggagaaaggaacattcggtaggacctgcaacagtcgtcaagtcttctttgaatgacaaaaccccaggtattggtggtttgactcgggtcatggtaccgtctccttctgtccgccctggagaggactactccggggaacgcaatttgataagccactccctaagggctgaaagagttagcggcgattccccagagattcttttgcctacccgcggatcattctatcggcaagcagtctcggcgggctccgccgcaattataagcgcacacgaatccaatggattgtccgtaacgcagaccataactcttcgcacgggttgagaattgtgttctgacgttgatccctttatgcgagaacccacatttcaagagatgcgggtcccaattgaaccgggtaccgtgatataaaatgaagttctccagtgcttcttggcgctctttccaaccagcccttaatttttcacgacttgttttctatatccttgcagtttacaatacccatccatgcgctggtaaggtgctggaagagaaatggcacatcccggagaataaccatcctcaacaatgggtattcgtacatggcaataagaagccatggaaagagacattcagactgatacaaagctacatggcatagacaatgaaagcttctcgattgaagcgaaaattatacaccgttaatttgtaagtaagcgaggaattgagaaacaaagttcaaaaccatatcccaggtgtatcctctcgaccgattcgtgggttcatgagctcgtgcaacatatcaagacagatttagtcctgtccacaagacgatttctcctcctcctttcgatttctcttctgtcgccacttgattccactagccgccactatccacaagcaaggagaaacagcaatagagatcaaagcaagtgtggtgtacgcccagccctcgcccatggcagagcgcatagggctgattgctgctgacgccgcggcacccagctcacaccggaatagattgttcgctgcagtcgcggccgccgacttgcccggccagagatcgaccattaaggcattcagcacttgggaggtaccaatgatcgaccatccggtaatgaacaaaagaatgataggagcggcaaggttgaccttgtgacccagcacccagccgtaggtcagcatcgacacattgctaatatagtaaagcgggagtgcgacttccagtctcgcgcgctcgatgttgaagttgcgaatgtccgcacgcacattcttgacgatggtgagaccagcacgttttgcatggcggcggtagttccagtcgaccagtcggccggttgtgaaggctgaaagcacccctcctccgccgatggggaggtacatcaatgcagcatggaggtcgttgaagtgatagatcttgtggaaggaagtcgacgcaccggtcatgacagcatagaaaccagcaaacatcaatcctgtggtgatcaggaccactgacgtctcgatatccaggacaaccttcatagtcgggactggtgacgggaatcgaagggagtagttcttccgcacctcagcttccttgtccgggtcaggcaagagacccttctgtctgcgcgtgcgatgccggataatatctgccacagagttactcaaagggggcggtgggatggacccgtctccaacgacctttcgacaagtttccggtaggaatagaccgaggatgaggaagaacacgccaccgaagatgagcagaaaccagaagatccagtgccagttagtatattgactgagaaggccgccaatgatgggcgacaaagaaggacctaacatgcttccgactgaagcaaaggcgatatatgagcctcgctccgcggatgtgatcatgtctgcgaccaaaccgttcgccagggccacagtcccgctgctccctgcactctggagacatctgaggaccagcagggcagcatagctgttttggagacctagtcccaggttggctgcaaggtaaattgtgaagcaaatgatataagcgggacgacggccggcagtatccgagaatcctgcgatcaacataggtgccactccctgcataatctagagataaagtttatcagttgtgggtctctttaacaagattatatttcgtcgacttaccaggtaagtagtgactgtcaggttcacctgtgagacggagatattcagggaattcgcgatagtagtcaaggcaggcagatatatgctggaagacaagggtgagaagaaactggccaaggatcccatggcaacaatggcccgcttctgggctactgtgaactgggaatatccttccaggcgcgtgtctccatgctgggttgacggatcgggtgttttggtctcaacctcgtcaccgcgctcttgcgccatgttgcctttgtccatttgattcatgaggtcggggatttaactgaccatgtggtagaaccgtggaagatgcgtttgatgaaatatcccgatagttttgatacttgcccggtgcagggaagtcaaccaattagagtttgtcgtcaatcccgggaccggcatcgacctgaactcagccttatatcaggtgccttgctcttgccactatttagttcatgcaaccatatgtacaaccgtccttgtgttcatagatgccaggaacgacttgcttgcgataagtattcttttcttctttcttatggccttgaattttatatttactcaaacattctcgtgtagattagagactcgagtgttcaaagtacttgtacatatcgatcgcaatactatatctcgaagacaacatgacgatgcttgtgctcatggtcatatatacttcagctataggtcagcatgtactttcgagctatcatcattggaatagactcacaccggagcattagaagtataaatgatgtcatctctcatcacaaagacattgtttgcggagaagaatgacatcttggcaaatcaagatttgcggagacaaagcgattccggggccgcggagttggcttccgcgcaaactttccgctttctagaaaggaagaaccgagacaacggctgtgtacaaggatagacgaatctcggaagcaatcgaatcacacccggttatatggatgcacaaacagctgagtccccggacttcagcttttccgtattctcttttccttcttgagctccggtgcgatagttcgatttagttattgttcgtgaatcgcgattcaatacacagacacgaacttaaccaacgatgttgcaatactcctccccgagaagtacatatctattcccaaatgaggttcctaatgggaggcaggaacaagatgctactataacagactcgttagaagttgcagttggattcgtcttaattggctataacaatgtgttttgtgttgtagtcgagaacagtcaattctctttttccacgattctcccttattacggcagccatcggcattggagcccttctctcggtggttcctgtgtgcctcatacttccagaccaaagtgtacgatagcaccgacttctttgctcggttcaatctcacattttctagtgctttttctcaagtatatgggcgccgaaactgttagcaacgccgcagtctccaagtacgcggattggatcagggtccttcctaatgaccgttttcatcggtttttccattgccgacattgctggctggcctagctcagttgagtggatgcgatatctgctataaaatggatgttccgggtccgagccgacagcaaattagctagctgggttgttatcaggccaccacggccaagaactacggcgctgcctccaacactaacagagtcggcatttatgtcatataagcaagcctttctacaaattttctacttatttccccacaccgccggggctaggcggtgattaataccggcgttgcggacctggatgtggcgaaagccggccgtcccttcgctcactccgagggcaatacctgcaacattgccgaggggttcaaaagcaattgtatttttttttaacatcagtttcttcggaggctgtgagttctatctaaattacagtgaaagcgcattcactaacttctacagaagcttctagataattctcaaagggtgagacctgcgccagtctggccgacggtctggccgacggccgcaacgattgggtcaggtacaacccagatgcctttaaaaatgcttactggctggtgaaccgggccaagatctattcccgaacaactaaaccttggaacccgaggccggactgaataccgagctgaactatcatactttaccatgtgcctaacaaaagttgtatatacgtatgcttagggatctaggaaatgggacaagatatgagaacttctgacatcattcctccgcattttcggtctaatccccgtgaatgctagtacaaggtcgtcagggagaccaatctatataagtggacctggccgagcgccaaaacacgctaatcccgatttaggcaaaccggggactgatggatctctcgtacaactgttgtagatgacatccaatcataggcgagcctcccacgccaccaaagccaaaatcccagactggactgagaaatactctgagcgcccaaaagcggcatgccaggaccatccccgccgacccactcgagggaaaatgcggaggtcacagaaagccgtggcatcggataattgttcagagcggataatttcccaacttccttcacggactatgtagcgcccatcggttcgtactttcctttccggaccgagtctagcccgagcccaacgcaaacttaccgggacgtacagaagaacaatggctttcttcggattgccgatgtcagtacaacatcaatcgggtaaaagcccccagacttcgccccgccatggcagtcgtaccacacgcggtaggtactggccgagcccgcattctggccctgaaccccggttttcgcacgctggtggggggaggcccatgttgtatcggcgctggtgactggtttgctatctcgcgttccccatgttccaccggaatataaccgaattcgaaatgacactccttgcttttcagggctgcttttcggtcgatcccggggaggaggtgttgggcatcatcgtctattggtgattcggagtagtgccgtctatgtgaccaggaagtacgggatgcatgcaaaagctttaaaaacctcgggggatcgtctcttttttttttctctccgcacttttgatctcattttaccccacgggcaagggtctgcttatcttttctgctctttgttcctatctcggtctatacaactgtatctttaatgcgacaaaccttgaacactcgattcatccctctcgactgcgttcaaaatgtgtgacaaaatcccctcgtggaatgtcgtccatagactggagaagcgccagcttctcatcgggatcaactgcgtggctgctctgtctattttgttcttcggatacgaccaaggaatgatggccggtgtcaacaacgcaaaggattatattgatctcatgggattcggtcatacggagatagtggacggcgaggtcaccccggtggtcacgaattccctgctgcaaggtggcattgtgtctgtctactatttgggaacgctttttggcgcattgttcggtggctggctcggagaccggacgggaagaatcaagaccattgcagctggttctctatgggctatcctgggcgcagctctacagtgttcggcacagaaccataattggatgatttgcggtaagggaaatagggttcagtagatgcagacttggactaactttcgcagcgcgtttcgtcaatggtattggaaccggcattttgaatgctatcgttcctgtctgggctaccgagacggctgaacatacttcgcgcggacaattcattgctattgaattcacattgaatattttcggtgttgtcctggcttattggttggagttgtacgtaaatccctccgtttatgcgatgtctttctaatatccgatagtggcctgtctttcattgacaacggagagtcagccttccgctggagattccccatcgcattccagatcatcttcctcctaggtctctttggggctgtctggttcttccccgagtcacctcgatggctcgtcaaggtcggccgggaggaagaggcccgctacattctccagcgtctacgtggatctagcggagaggacctcctccgagcagaagccgagttccaggatatccaaagcattgcagagctggagcggacaatgaatcacggcgactcatatctgtctatgcttgttggttacaaatcgggagacctccacatcggccgtcgtgtacagttggtcatttggctacaagtcatgcaggaatgggttggtatcgcaggagttactgtctacgcaccgaccatctttggcatttccgggtttgattcgatgaagagtcaatggattagtggactgaacaatattttctacatggtatgtttcaaggttgagacaagactgagttgtgctaatgcgcatgtctagtttgctacgctaatctgtgtctttactctggatcgcatcggtcgtcggtggactttgtattggggcgcggctgtccagggtattgccatgttccttgcgggtggattttcccgtctcgctatcgacaacaaggcagctggtgatatgggcaaggcatcctcgtatggtgctgccgcggcttcgatgattttcatctttacctctgcattcggagcttcgtggctcacagtcccttggtaggaaaccatcctgtgacctttttattcaatactaactcctgatccatagggtctacccggctgaaatcttccccctggccgttcgtgcacgtggaaacgcctttggagttgtcggatggagtattggaaatggatggctggtgagtgaacgcctttaaatgaatacaagaccgatatgctgacggaacgttaagactctactatgtcccgtcatgttcagcgccattggcgaaaagacactttacgtcttcgccgccagtaacgccctcgccattcccatggtgtgggctctatacccagaaagcaaccagcgcacgctagaggacatggatttactattcgcggccaagacgccctggacctgggatgcagagaagacctttgcgcgcctcaaggcagagaacccaggcatggtccagtctctcggtcccaagggcagtctgttggacccggagactggaaagcctctttctgttgctgcggctgttgcggcttccaaggctggtgataatgctgcaggagcggaacatgtagatcacgcttagatgagggaggacttgatgatgtggtgtttggtgatgtttgatgtttgatgaataaccaactaataaattagatggatgtatggctttagactgtgtatcttatccctagaatatcaaaagatcatgaaagaaagatgttattgaccgaaccactctgattggccacttcgagaacaacatccatcaactctacagttcgagcttacagccttttttcccctctgactatttctctctctccaaatattcattatcaacacaagtccctaccacatctcttcgcatcaacactcacgtggtaagtagcacaatcccaacgcgtcgcgtcgcaccgttcccggctaaatacaaaacaaaataaagatccaaaaaaggcctgcaacccaaaacccaagcggataacaacatataaaaaatctaccaacatcctacgttgtatacgaaagggtcgcataatcatgtccctctccgcccaacccgcagatccaaccccagacgagcaagacccccaaccccacaactcccctcaacccacactacccacagcgcaaaccaaaaaatatctccaccgcatatccctgcacccaacgctaaccccctaccgccggcgcgtgtaccgcacgctcctctccgtcccgccgggtcggtggaccacgtactcggcgatggcgacgtatctaggatccagtgcgcgggcggtcgggaacgcgatgcgcagtaacccctttgcgccgggggtgccgtgccatcgggttcttgcagcggatgggtcgttgggtgggtataaaggggagtggaaggttgatcggcataaaggtggtggtgggttttgcgaggagaagaggcttaggcttgaggaggagggggttgtttttttggatgggaaggttaggggggtttgttttaaggagtttgtggatttgggggctaagtgagtttttccttttgtgaagattagaggtgttcctgagttggtgttgatggttcaggctgtatatatcctgaaactgatttatggattcggtctgaatctcctacctgggtacctctatgtacggtggtgaagatccggagcgggaaggcctaggcgacactccagagcgatatgccagggccatgcgctattgcaccaaggaatacgagggcaatatgtcaaccagaatatgaacccattagacccctaacaattaccttggtttttgtagtggtctagtggtatagttaatacatcgtatttgctcaacacaatattttagacctggtcaaaggggctgttttccatgagaatcacgacgagctggttattgtaaaggatatagatgtttttcccaccatattgttcctttcactaaaaaggtacaagcttctacgttcagctctgccatacaacactgaccatgtgaggcagatgcacatcggttcggttacatccgcgatcgtcacttcctcggtctctctaaactggcccgtttggctgagatgttctctcacagactccatattcaggagcgcctgactaaacaggttgctcgagctatttctggggtactgaaaccgcaaggggtcagtattcttatgcaaccatcctacctttgtatggccatgcgtggtgtacagaaggtaggtaataccaccattaccggctgcatgttgagatacatgcaatcacgtgcaatagatagggaagaattcttggaactcttgcatagaacgtagctaatccttacccatcggagatgctttggctacattacgtacatccactgtcacaaccgtttgaagcataataagtaaattattaggattcgacaatacctactttgggtgctccctaaagacgtcccgatatcccagcgcttctgccttcccttcaacgagcgaagaaagattagccacaatctggtcaatatactcctgtatccacgtactttggaagatacgggaatattctatattacacgtaaggcaatgttgtgtggcatgttaagtatgcaatatgcgaaaaatttcccgcggatggtgcgataaacccaataatattttgggatcatatgtatattgcgaggcaattgccattttctgacgtggcaccaattgacgcaatgtcccaactacccctgtttaccggtagctttgaccggctattgaagaatctcccaatgtgcgcttttcctttttcggtagtataaacagagtagtgttttaattcaattaggaactagatcagcaacctgagcgtccagcatggaatcacatctgctcggtatctctcaagcactttactagacagccctagatcagtcatcctctcatgtatggatgacgagcctttgaatgaggaggaaaattttgcgtactgttttggaatcagccctgtcgtattcagatgttttcttgttatgttattcattggatgaatcctcacaacgttgcctggctgataatctgttccatagatttgagtttcatcttaccctttatactacctgcgcatctataacggcgcttacaataggcctgtcttgatatttttcagccgtgagttcgtagtgcttactttgcatcgaggcagatgactgggtcacgagctgtgtgcgtcagtctgtaatattcgattttagatatatatgtacgtctacaaatcttagtgtagtgcacgtaatgtaagtctgcttgtataagcttatcaccgctcgttcagtcattagtataaatctacgcctccttccggtcttccacagtcttttgatatgcatgcatcatctattaccgctctttgtctgtacctagagtgagcctatgaatcccggtcatgggcgatactgacgagctcgaattgtttcgccgacggtggcgcgaggagctcttaattgaatcgggccgcagggcttctcctgctgcggctttggcctcaactgccccgcctcggaccaagaaaaaaatgtctattacgacatgttcgatgtatcaagatcttcacgatgaggtgtcgagcttgctagccgaggtagatcttcattatcagtttttcgaggaagatgatgagacgaaatgcactcgaatgcgtgacacaaatattatgggccgttttgtgtgcaaccaaagagcatgcaagtccaaaggatggtctagcaagaagatcgctgtcacaattcgtctttatccagagcaaaagtacaatgccagggtataccaccaacgctgcaaagcttgcagctcgctgagccggccggttttggatcagtcatacgccgagagaatcgtttactggattaaacaatggaacgggattcgggtagagaggcctccattctcccacgaaagaagaggtcctcataacagtcagctttgtgaggggtgtagagctgggcactgctcccaatctggggaggactgggctatccggctagaaatgtttgtctccccaaccaatacatatgactgatttactaattgattgccaggttgactctatagcgagccggaggtctatggttgattgcaggattataaactgtcagaatctggaatgaataccgtcatttgttcatccttgatacagatgggtcacgtaattgacaagtttggtttttctggcgaaaacatactcactcatttcattttgtttgttcttgattactgagttattgtccacaagattgtcattttcccggactagtgtcatcttagagagtgagagatgttattgagattattctgccacgtatacactcgcattaccaccgtttttctgtcacaaagccataaatgagcgcattggcaaggacagcatgtgacgcgaaatatccatacgtcagttgctgactacacacaattttcgttagttagtactaaaaccagactatctaaggtagctgatgtttaatgacagctattatttgcaattggaaaattgatttacctggttctcaaggtatcgttccagctctgctatgatccgcatgctaactctaaaccccattatcaacttctatgttaccgggaggttgtcgtctacattatacatgtatgtctttccacaacccgtcggcatctgaatgttggaacgtcaatgtgagggctcgatatataggcatagaagacaagtcttaccactgctatgatgttttttttccatgctcatttcgaacatttccagctgatagctacgtggctgaagatcgaccatatttgagaaaacgtggataagtccaatatgcggcaacaggagtgattcgatgcctctgactgctggcagttacgattttttaatcttctggggtcgaatgcagtttgttacttatggtctgcttttcgcgcgcgatatgtgatcacgatgcatatgatacatcaaatctgcactcccggtgccaaacttcctccgagaataaccaatcacgttctgcgacgtggatatgcgctgttctatgcaagagtgtctagtcggccagattcacggtttgctggggatgacacattttcctttcgccaatatggccatatttctatacataatgaacaactgatgccaaacctcgcctttgcctaattcaataaccgttacatctggcaccttatcacaatcatcttctttatcttattattcgtacactcgacatgagcaaggattctgtggaattcattcgaaatctagtcgcttgtccagaattaaccgagtcggacatagacgttgcgctaaccgctgctggagtagacgaacttctcccggatggaaacagaaaattatcccaattgggcttggcggcgaccgggttcttgattgattccagcattgcctttattacgttatctcgaggtatccattgacaatctgttgcgagtcttcccaaactgacaccctcgagattttacatcgaagctcaaatcccgtgtcaacggtatccaacaccgtgcagacattgcaaagcgtactggcatcgacaaacacttgaaatttgattgtcggcctggtgctcgctcgtccggcgttcttgctatagcgacaagcgccctcatcggagctatatacctcaggaaaaaatgtttcatgtccgtggccaagggactttactctctagggtaggtctactctagtaaccccaggaataaatccctaattgcgcacagcgtcctagacgagcaccttgaccagctcaacttaatggaaatattcaaagacgagcagagaaatccgctgcttttgccttccttggtggagagtgattctgcccagactagcgaaatctggagtcaagatattcccccttggccggattttccgaccactccggatctagggggtttgtctaactatgaaagactttacaatgagaatggattattgaaagatatccttccagatggactttctttcaccgactcgcgttcggagtctcctttagctgacgacccaggccaacgggcgttagagaggcaggtccttgggatttgtcatcctattgcgtatcaagaaatgcaccatggaagaccccatgaggtagaaatcccgcctgaacaagctgaacagcatgctcttcctcgcagaatgtacgatcacctctctattagcgttgacttgtaccagccagatggcttctcaggccagcccgcgaaccaacggtcctcaagtcagcatttcccacgcaagcgagaaaacgctagtggtatggaagtacaaaagagaaagtctagatgtgttgatattgaattccgatcatcactgtgtcgagaagctgaattgactcgggctctgggtttgccgccccccggagatacttatttcaggcccaaaattgaggacaagctactgagtctcggttcagagatcttttccagtctaagtacctttttgattctggttggtggctctcaatcacttgttactcttcgggcggccctaaaatatacgagagagctgggggaccaaggccctagcgttcaaaggcgaagatgggtatcacgtgagctgaccattcacgaacgcttcgaaatcatcggcgaaattcaagacaacgcggcatttctccagatcttgcgatgtaaccatatcctgcatttctaccgatgcacctgcagtccggtggagcgcacctcaaaattcatagagttagcgtccaaggatgagctcattggccagccgagagcaagaggcaatccgaggaagatggaagtggctaaagtcgtcaacgaaatgatgagggatgttttcccagacctggagcctaactcagctgtttacaagagcaggcgccgaaaaatgttgggatttcgaaaatttggacaacgcctacacattctagcggactgctttggggatgctgttctaagcatacttcatttcgatcggtccggtgacgtggcgggccctgtgattatcgaaaaaatgtgagtctatatcactatgaaatcgtggcgaaatgtaaactgaccatgcaagtattcttgctccgtcggatgaggcatttgaaacttttgtgaaggtcctcgaagaatcgcaaggaagtcttcttcgggagattagcaaggcagccgagcaagctttcaatcatattctttatgaggatatgaagcggcaaaatctttttgctttagaaacactggcaccggaagagatcctgaagtttccaaaaggctcgcaagagctcagaaatctcttgcaatagtcacgtttcctttcgaaagagcaagaaaaggcgaactgttgctttcgggacacggtgaggaggaagggattcgtacgtgatagcaagtttgcagatctattttcatattgtattgaattaaatcagcgctctgtaaaaagaaaggggtacatcgagacgccgccaatagccagtctttaaatacgctactaactaagcgttgaacagcaaacgttctttccttatttctagcacggagactacccacctcatatgtgatacaactggctaccgtatctctccacagtacattccacagtgcgtatggtgaatttcttttcccgttaattgagactatgtgggaaacttggatatatcaagtaatggtgtgacaataaaagctggtggtgcattgacatggtacatatgcgacctagcgaatgcaaacaatgctccgtccactatcccatgtaatccttttcctaatcataaccttgaagggttcattttggaaattcatgatattgccgtcctctccaacgagatgcgctgatggagcgaacacaatcgcctcgccagttcggagcctggcaattcgagagagaccttttttagcactgtcggcctgatgtggagctatttcaccacccatcggaacatgcttttcgatcgtcttgtaccattgagggctcgtaaatcggtggattacggtcaacgagcagaggtcgatcagctggggcgagatcgtcggctcttgagtggaaataattatacgcacacccaagtgtcgctgctggcggataatggtaaggaaagtctcggtaagcgcctttgcagcgagggtgtcggccatatactgcccgctgatgttaatgaataataaccaggatacttcaatatgaacaattcaccttatgggcctcatcggccacgatcatcttccctcgggaagggtgagcgtagaggaacaagtcgatggcgatacggaatagaatgcaagcagtgctttggtcgacgaaagggcacgacaagtccaggatagtgacaccgccgtcaataaagtagtcacttgtgtccgtgccagcaaggtcgagataagagtcaagcaggtctaatctttgatatagaaaaggagtctgagaacggtcaagtttgagtgcgttcagacggccccggaagtcagaataatcgaagtagccgccgctctccatcgccatttcccgaaggatccgagtaacctgtgccatgtagagggggagactgccagattgagaaacagacataagcgaaagcatcatgcttatgttgaggtgcttaggttgaagtttgaacggtcgaatctcgatattgggaatctgggagtacatgcccctgagattagaaatgtttgtgggagagactaggacgcgcagtgggaccggcggtgcatgagcatattgcggtagaacactagctaggaaggcggcttcgctgggctgcgagctcgttattgatgtatactcgtcaaactgcagcacaagagtcgatatagactggtttagggttcccaatgctggcagcctcatagagcaattttctaaggtaatatcaatgactggtgccctatgggtagaattcgaaacataccgatcatgcaagcagtggtgtgcgacttgccactcccttgcacgccgcagataaaggcagagaatggaatattcgcattcaacattattctgcaatctggggattcattccctctgacaatgtttccgagcagcatacattgagaagggagagaatatccgaacctttctaacaagggagataccaggatggcatgctcattaagtatagcatccattgcttcttccctttgttcttcactggagctcaggaattgacactgtgcctctagggaggggaaggacggagaggcccccgtttccctcgcatggagatcgccggcaaggtggtccttgaattctattagaactttagaataccgcaaagtcagacacaaaaaggatggaagagaaagctctaccttgtagacggatattgactatgcggccaatatcattgtcgatgaccgagttcgccgcctcatagttatcgaggcctgcatcgaggtggctctgagactgttgacctgtacctatatagagcgcgttagccaaggccatttatgttgtaccgtccctctaatattttctgagatataccggatgatagaggatgctggccctgaccttggagacgggaccgctgtgaaagagtgggagcggacagtggtatgttttggacttgagctgatcctgaggtttcgatttgattgttgcttctcgacaacaaatcgagttcattcgcatagcttaggctctctttaggaactgtatatataggtaacagcgctgtacttacctgtccacaaatgccctgataaaatcagcatgattcgggctctttcccaaatattttttcttgatcgcttctcgattgatcggctggttttgtagatgacgactataaatagagtcaccaatcgccttctcgaggagagcctcagtccaatttttagattttcgtgccatttttgatagatactccaggggatgaaaagaagcctgatgaaacgatgctagaagacgaattagcagtgtacatgggggacataattatagcagtgcaaaagacggttgcagggtatgggggtattggtgcttttagtcacacggagtcacaaaagccatgattctactgcagccaaacctacaaattacttgaacgctagcgccaagtgatctaagtatgtatgtatgcatccttgctgtcactagacgttcaaggtgagtgcaggcaaacccggctgtcaaatttggtccacatatctcttactgcgacttaggctgtgcccgctcgtttggtatggtgcggtggctaaaacttaccaattcacgccatacctaggtaattcatgtgacgatgcatgcaccaacatgcaaagagcccgacggagcgcgacaagcggcgctcggttcggcgaatccagtaagggttactttggagagtggatgttgggaactatcaggcagcctaggcttagcctggccgttcccttttaggtattatagacatggtaatgttttaattccaagttgatttccaatgaacttggccgtccgtataggcacttcggagctaattccgacggtgcggcttggttcctgatctacaccagttccatatcacacagcatctgaacctttacgtctggcttccacaactcggacaagttaccggttcagcccctatcaacctgaactagatcagaagctcttctgattttctggcgtagtggcgaatgcgcaaatccagcccttgttatatgcacggccgcatggtcgcatggaaggctccgtttcgatcgtattggtatttcaagtaaagtacaaagtcataaatcatgtgacttttgcttataatactaattgtcatctgggatgaatactccctagccttttccgaggcaagaaaagaggatctacgtgtatgaggtgaaactgatttcgaacgcgtgtgtagctttctaatattggtcgggtaagttctgatgctcatgtgccatctggcaaaaagccggacccgcttggttagaatgaaaacagtgtagacagatcccaatccgactcgtcaaatcatccaaaccatagcgaatggacattcgatattcaggcacaaaatgcttgtatccatatctgcattcaacacttgattcctctggaattggatcgggcatcctatttgctcgctcgatagcctcggcgacgacaaacaaggaagtcggccaaagattctgtgcctcgagtagttttatgtaggcaaatgcgtatttgcttgtccatccacatctgtggagacacccaagagcattgatccctccaatcagaatctctcccaacttcagcctcgcgaagcccctttgctcttctagcagacctaaattgaatggtcagtcacaggtgggtcatttcacatcggttgaaacttacagaacactctgtcgcccaaaattgacctgacatcttcgctcaaaagggcaaggtaagagtcaccgtagttgagaaccaggacctttgtaatatctctgaattcttgtgcgttcttaaacaagctcgctgcggccgcaagaacaataagatcactgactcccttattaacaggagatagccagaattcactggcaaaagttaaagcgtcaacaacgccgaatttgttcgctgcgacagcaattctaagaacatcatttacagccatgacctgaggtagcaatctgttctgatggtgcaaaattgcacaaatacatctcagcgccatcgcattctcttcgggcagtattatttccacgggaagacccgtgacgagtatatgattttccttccagtctggccctaagatagtacctggtagtttcgaggctgccttgaggaaaattgacttcacgcggagcctcagcttttcaggtccaacaactagaatgatatcaccagctgcatcgatattcacaatcttgtcccgcgtgtctgtcatttcgaattgattggattatgcttcgcaaaaaaaaaaactgctctaaccaaagggtgcacgtaaagtgatagcctctgaccaaggaatcaattagcaatcaggttaggtgttactgggcacgggcagtctttaagcaaatattggaatgggatataaaaacaaaagacaagggcaagtgaggtttggtttaccttcaaatcgagcgtagacaaatttgaattggtgagtgccccaaaaaaggttcaaaagataacttgtgggacataaaggtataaaaggggacttcgagatcgttgacaagctctggtaaaacgaagtaataggaatcaggaaccccgatataggctgttcgttgtctccgcgtgctgactttttttcttcagcaatgctcaagacaacaccacgaagtgccaaaatataagtcctgcaaagcagctttttccgtgggatttcgtccgcttgcgacaacttgtaataagccccaaatcgcgactagttcgcttgagtgttcaaaggggggaataggtgcataataagccacagattcgtgcattcagttaatctctaattagcccctccgttggtgccaacacattggcaggggtcgggagtgaattgcaacgtgtctgagctgcaatacatactgtagagaacttttggaacgcgatcatgatagaaggaaatagaagcagaaatatcgtcaaagtgacgtgtacaatgatgggcggattaattgctgtcgaccttctattagtttgacgcatatactggtgtgttattcccatgcattggcttgccttgcttgatcgcctccacgtctgattgggcagcttcgcatacttaggcaatacgttcgttcttataatactgcatgtgcttaggcatccgcttcgcaaaaaaaataaatactcactacatttatgagaacagaaatggtggtccatggaccaatataaaatttagaatggtaaattgacagggaacagttggcccaactatttatccaaacttgtccagtcacacgataagttctttgctctaaacttagcactataatgtttaatcatgatgcacaggcactatttcctagccgccagcataagagacagcctttgggtattgtcgatttctcaaagtgtgtgggagatagaaagtctgccagctttactaatgctaaactgcctgctaattcataagtcattgatagccaacacataatgtatccgtagtagatatatcatatgtacaaccgctgtgtctgttaatgaggatacgtggatacgtagaagatgtgtatgtttggtgccttgttcgccaataatggagatatattaactagcttttcaagtctcttcttcttgccgctcgtggatgaaacagttatgggtagctgctccagctctatagtatactctgctcaatgggggttctgggtttggtaatctgttctggggtgttcatgttccgattcagagtcactaatcataacttcctcgggcgattcgatggaattgtaagggtctcggacattgcttcatgattttgttgtactttagctccgactgcatcgtctaaatctaatggcgtggccagtgtacgtaacatcctagcgtgagtccttttcccttaccgagccctctgatcccaacgaagcgccgacaagtatcagaacccttggtgagaatccacacttttttattcggttgttccctgaggctttggctttcctccgattcaccggcaatttcagtgaccaaagttctaggcatctcgaacgcagttataggagtaaaaagtgccggtagagcgcttaaaagctagacttcgatcacttcggtgcgggcttacagctggtcgaatgttagaatgggaccgctaatttttagcgcctcttgtcatccagcttatgtaacgaccaggtgatgctcatttatgattatgtaatactaagggtcgtgctcagttttactcagtgcgcaaaaagcggcaaggcctagatatcgatatttcgatgtggaatgactccaatagcgtgacaatccccagcagctctttgtcagatgattataatccagacgaacctgggtcagttccaaatgcttagaaccactagccaatttccggttggctccgagggctgaggctagtgataactgcgtaatggagtgaacagtggaccctgcgatatgcttttgactggtatatctgcagctttccgtctagtgtttgccggattcaaccccggacccgactcacagagaccaggttacgccggcttggacacgttcgagtttcaaccgaatatgcagtccagagcacacgaggtggtttgaccttttcatagaggtctatatactgaaccaatgtcactttgtaggaagtagttgaagcttggtgatagttcataggattggcgatgcaaatgcaccagaactataggccagttgttcgataggtatcttgcgagtatgcggcgatatcgactatacacactgtgctgttttatacttccagcgataagcacaacacccggtttcttgcaccctccagatgtctctccaagtcgcgggtctttgctgaaacatccagtccctcctgtttctagtgcatgcgccgggaatacacctacaaccagacatcaatggtgtgaacacgatctatacaccgactacacaaaaacaacaccagaaaccggcgtcacgcgagagttctggctcgatatagaccaagcaacactagcaccagacggccgatcaagatggggcctaaccatcaacggctccttaccaggcccaaccctcgaagtcaactggggcgacgaggtagtcatccacctccgcaacagcctccccaacaccgtccacaacggcacaagtctacatatccacggcctccgccaacactacacaaaccccatggacggggtagtctccgtcacgcagtgccccgtcccaccgggatatacaatgacctatcgatggcgcgcaacacaatacggcacaacatggtaccattcgcacataggtttgcagacctgggagggcgtgtacggaggtctgatcatccacgggccggctagtagtaactacgacgaagataaaggcgtcatacagctctccgactgggatatcaacacagtcgaccagctctggcacggagcagagacagtcgggtcgccggtgctggacaatgccctcatcaacggcgtcaatgtctttgggaatgacagtgacccgagtcagacggggtaccgtttcaacacctcgttcacgcccgggaagtcgtatcggctccgtgtgatgaatgtcgcctgcgatacgcacttcaagtttagcattgatcaccacattctcacggtcattgctatggatctggttcctacacagccgtataataccacagccgtgagtctggcgattggtaagctttcccttcataccaacgaaccaaccgaaggatacatctaaccaatcgaaaaggacagcgctacgatgtaatagcgcacgcagaccaagcctcaacagccaaatccttctggctccgcgccgtcccacaactctcctgctcagcgaacagcaacgcggacaacatccgcggcataatctactacacccatactgacaaaccaaaccaaccaacccttccaacaacagcagcctacaacctaacagacacctgcgaagacgaacccgcctcaaaccttaccccgataatctcaacacccctcatcctcacagcagaagactccttctacaacgaaaccctctccgcaaccgccgcgctaacgagccacaccgtctaccgctggtacctaaacagcacctcgatgcaagggaaatgggcccagcccacgctgcgcaatttcagcgccgaaagcagcatagccgataaaccggctgtgatagcaattccacaggcagattcgtgggttcttgtcgttatcgaaacgagtatggatattgcacatccgatccacctgcacggacatgattttttggttgttgcgcagggacatgggtcctgggatggctccacgtctacttctaaattttacgctaaatctacagcccgggatcagggtacgagcaccggtctgaatctcgacttcgcggccggcgcactaccgaaacgtgatacggcgctgctgcccggtttggggtatttggttcttgcgttccggtcggataatccgggcgcgtggctgatgcattgtcatattgggtggcatcttgatcaggggtttgcgttgcagtttgttgaacggggggaggagattgaggggtttttggggggtcgtgctgttggtggggctggtgcggattggagggggtttggggatggtctggagaggaattgtcgggcttgggatttgtatcatcggggaaataatgttttggaggatggggctgggatttaatttgcttttgcgttatgaaatgaactcttggtacctgcatgtagggattattttggattaattaattaatagtacggagtagactagttacatttagggcatgcattttaggtgtacaaaggacaaagaaaagacaagtctgaaatttcaatcgagtttttctttgctttttctatttagtttctttgtattctagggatattaggatgctcgatatctcgtatttagaaaaacaaatacgaagctgcagctactatcacagagtggagtatacaaccctagagatgtaggacctacttagtccggttagtccgagcgactactgcagcacacgtactttaggggaaattcactagcaaagaaaggggaaatgctaggtagataggaaaagccgtccaggccaatgaagaaaaaaaaaatagtatatcgtaatcgtcgccattcattgaaccatcccacctaaacataacacatctaagccatctgatctagaatctaaaacacatgagcgatcagctcgaaaaatacaaaaacaaaaacataatccgaagaagcgatgcgcatcttctatacaagaccgattcataaccagaatgcgatctaaggaaaaacaggagtgggaatgggaaataagcaaaacagaaaagaaaaggaaatacagtcatgatatcatatcgtaaacaagcccgagggccagaaggtaaaaggtaggaaacagcgcaagaagaaagaaaaaaagaaaaaaagaatgcagaaggcatcacactcatgagatttgcttcgcagagcgcttgcaggcaccgcgcttcggcacgtccatgtggtggtacgagcgcaggtgctcgacgaggtggtcctggcgcgggaagccattgctacccttccgcgagcagtgctcgacggggcaattgcggaagacgggatagtggacgctggactggtggcgcttcaagtctgcgaagcgggtgaaggacttgccgcagttgtcgcagccaaagggcttagctggtctggtggggagatgttagttggttcaaggcgacagcacgcgcgacggtagatggatggtcggcttacttggatgccggcgctggcgattccgcgttggattcgtattcgctgatggggtaggttggtagcgcgatgtcttcggaggggaaggtgaagctgctgctatagctactgctgtagctgctgccacagctgctgggtgtgctctggggcatggtgggtcggtcaaagaccgggtaatcgtgtggggtttggtaggtgtagggtgagctggtgacgttgtatagctctggggtgacctcttgcatagggaagggactggttgcgtcgaggtcgcagagggaatcgtagacgggctggccgccgtagaagaagaagtccatgctgcccggtgaggaggagtaggaggaagagtaggagtctgggtagttgaatggggactgcatgttgatgttgatcggggaggagagggagcgatgggtgggaattggaattgcagtcttatagagagagagagagggttagtctaaaatctgccatgcgaactaaagtcaagtcacctaccattgtaagaggtaaactaattatgttgtaaaggttaaaattgatttggcccagtatttattcaaatgcaaaataatttccccccgttaatggagacatcagcccttttatgtgcccaacacgaaactgcatggcagggggtgttagggtattggccaacacgggacactaacaacttctagaaaccttctcgaagcagactggacgacaccactcagcctcggggatttgctgatcttttgctaacgccgaatattccacggcccttctagcgtgtccttcccccccctctcatttcacgtaaccaacggtgattggcggaggatccggtgtcgaagccaacgaggtcagttagttggctgcgataagcagttgggtgcccagagagtttccccctcacgccgatcctctcatgattggccgttggcgggttctgtgcgtcttccgtgtgtcttctgtgtgttctagtgtcattctagcgtgccaagaactcgtgtctgacatgtttttttggttttgttttgttttgtttccgtttcatgtgttgcatgatgtagtgctttgtgttggaagtaattgtattcgggctgaagtcagagactcagagcaatatcaattcaatatcaacttcaatatcaatatcaaagtccacttcaactcaactcaaccagctcaactccacttcgactgcccaactccagacatccaacctggtattgacgtatatcggcacaacggcacaatcgtgccaattacatcaccggatcaagatccagccttaacccgaacatctccattctccatctccacggagaacttggtcgtctaatattcccacaattcccaaacccctccaatccggggtcagagatcgaccgatgatgtcgcggtcgcgcacagccctgacgtagcatctactgactagcgttcgcatatccccggcttctagaaaggacaaatcccgcgctcgagctgaaagagcccatgcatgcaacccgtaatgtatagttacggagtactccgtaactagccccagcgaaatgattcgtcatatgtcgctcttttgattttctttattcgatttattctcagtcggggatacatgacattgcttccggtcgtgttgttgggcaaccttggacttggcttttatgagccccgttgcctttttcctttttcctttttccgatttccggtttttgtcgcatctcgggcttatactgatatatttttttcgctattggcttgcatgcacttgcatatctcctgcattattgtcccgggatgggaaacagtactccgtagacctgcagacctacgtgtccacgagcaaatacgataaccccggacgatcatacggagttcccggggtatggaattaggtacttatgatatctgctgatccagggcctggcccgtacccgtacctgcaaggcagactgcgcataagcatgctatgcactggacttggctacttggttacttggctgagccacttgcctacttctgtaatatgcttgacttaaggattcattgtattcgaacaattgataaccttggaaataacacgaaactcccgtatcaccgaggcccattcattgcactcattgatgccagtcctgcgaaaacagtaaaagaagagaaaacacgcccaccgagaccccacagtttccagagtacccgccatagcctcaaccatccagtctatcgaaccatagccgcaaagccaccgatagtgtaaacgaatccagggtgaaaagcaatcatctgcacttggagacccgaatgggtggctcacgagtaaaaaaaaaaaaaaaccaaagacgcctcataactcgtcctcgaggtatttgtacacaaacttgaaatcagccttgcgccgattcatcctgttgttattcgtaagtggtgagctcgtcaagtgggtgagcaaaacgaaatcagtcggattctttaactgaccatgtgctttcgtagtcgaagaagcgataggtgccttgttcaaactcctcggtaatgttcttcggctcctcgtgacgctggaaccaggtttgatactgcttgtggaagcgccagctctggttgcgcagcgccttggccgcgagatattgctggtacgtcccttggcggtagtagaaaaggtagaagagggtatccgtgtcgattctcccggtatcgtacaaccgagggtcatcaaatattggaagaggttcctgtggatagtagagcgcagtgctgtaggggttctgcggcttgtagtgacgtggcttttcggcatcgccagcctcgggacaggtcgtcaatgaggtagcgagaaggcgctggaccgacggcgacgggttggccgacgcacgggacttggtcacctcaaatgattggagcaggtcctggagaccggggggcaggtggtagatcgattcctcactttcggtttcttctgtctctagtttaccgttcgttgatgtctccgcctttgcaggcgcgggcgataagacacttgcactcacagggaccttgggtcggacgtgcccagcgagctcttctgtaacggcggctacagtgggtgggattattgacttcataacaggctgtactgacgccacactgggcgaagcagtggaagacttggagataggtagtgccacggacagagccgggctgaaacccggtgggggtgggagagggagaatgccaacaccacttttgtcacttgctgcggcagcggcagcggcagaggcatacttgagggtttcaccagggggacgggtcggaaggggagcaggcttcatgcccggagcactcgaggaagcagaggggtggagggtagcaagaacaggaagcggggatttcatctgtgtggacggtcttcgggctgctggcgcttcttgcttgaccttgggtttcggttcgggctcttcgtcttggattgattgcgcgtcttgtgatgatacacgatcaccttcgccgcccatgccaaattgtgcctcgatctcctcgccgatatttagatcgtcgtagagtgtttcatcttcgccggagtagtcaagactgccgccttcttcgacgtaatatttgatactttccttgagatcttgtaccgcacccacgtccaggttgccgttctgtaaagaacgattgaggaattccaacttgttgacgtgccatttatgtcgttccgtaatatgggagatgtcggccagtcgatctgccttcttcgtatccttcttccctttcttcatttgtgcatgaagtgtttcctcctctgcttccaaggcctcgatcttcagctgaagctcgtcaaccatggtggagagaaactcggaacactcgactctctccttctccttggggtcaagtcgcgaagctgccgagagaccttccttggaatatgctttcgtcttcatttccttttcgacggctttgaattgttccatgcactaccgacaatgttagcttgctgtcctcaaccattggactctgcgggggaccaagataggaaacccagacataccacttcaatcgctttgcgctgctccatgagtggggctttatctttgacctcgttcccagcagcccatgacttgatctgatcacggaatctttgaagcttcttgatctcgcgcttgaggtggtcttcgagcttatcccgttgcgtaggattcgtagcctggcggatcttctcgtaaatgccttcaaacgtttgtatcccttcggagaccttcttgaaggttttttcaatttcctgttgtgtttttcgggctgccattgtgaacccggtggtggactgtgccgtcctggcgtcggattaatgcggtcggaacggggagatgatgcgctttcgaccgaaatggtcacaagtacgaaattaaggtagttggtgaaggaagaattgtgggaagaagggtttgtttgacagtaagagggacacaggctcggaagtccatggaatacctctccgcgtttaagtggaaagcttcgtggatgctctaataggtaggcggtcacgggcggaggcaaacgtgagggcggcgcgagggggattgtgggcgttagacacacaagtcgctcgtcgcatttcaatttctcagtgggaaagaacacaacttaccacaaagaaaccagtcgcgctgacaaactgcgtcaaacgagctcattttggcaataccacgcatttgctgccagcgctatcaccagccttatctaccgcaactgcgtaccccggctttagaagctgtctctcattttgacacatacaagatctgttggaaatcaagatgaaaggtgaggatctctgtacctatactatatacaaatcaactcaccccgttcagtcatcatccaaagagtcaaatcggcatccgtgacagtcgattcggagctagtctcctctattggcaagggccttcttgtatttgctggcgttggcaaagaggataccgagaaggaagcagagaatatcgtgaaaaagatactgaaggccaagttctggcccgatgagaatggggtacaagtaagtcaatggctatcaggtgtgagaccggcaattgacatatcacagtggaaaaagaatgttcaggagattgagggagaagtactatgtggtatggctcttcatcttactctccagaccactgctgaacatgactagtctcccaattcaccctctatgcaaaaatgaagaaaggcaacaaacccgactttcatgatgcagctggccctgaagctgcacgcagaatctatgacttcttttatgacaagatgcgggaaggttatactccagaccgggtcaaaaatggtgtcttccaagccatgatggaggtcgaattgaagaacgacgggccggtgggtgtgaactactgcagcgaggacgcggcggtacattttgaccttccagttcctttcctcgccttcattgattatatactgacttggtttcattctaggtcacaatcgaaatcaataccaatcttcccaaaaaggaacccaaggagcagaaaaatgacgacaaggataaacaggacatcaagggatcttttgaattccaaattcccccagaattgctgcagtgaaaaaaaagaaggagagaaacaaaggaagattaatagagattagagtaatgctttgtacttaaacgttagcagatacccccaatgcaacttctatacaatcccgtggtccaaatatagttggggtcaatggaagcttcctgaaccacaagcgccggactcccccacaacgccgacttctctctcctccacttctctaccatatcaccttcatttctctctcgtattctttttcacctttgaaatttcttccccgaaactccacagtcatggcgaaacctcagcgtacgttcagtgcggggtccatctgcccgcggatgcaataattgagtcgagtcgctgacaagctcgtaggctctcgtgtcttctttgacattcaaatcggtgacggcaagcctagccgggttgcctttgagctggtaagttgcccgcatcctctatatgccgagtctggattgcatctaacatccgggtgttgcacagttcaacgatggtacgacatgattttctcccttgacatttcggacctgactaacagcaacagtcgtccccaagaccgcggacaacttccgagctttgtgtaccggcgagaagggcattggcacccagggcaaggaattgacctacaaaggtacgtctacaataccccgctcccatcgcgctgacgcccactaaccgcggtgtcccgatctaggctcaattttccaccgtgtgatcaagcagttcatgattcagggtggtgacttcaccgcgttcaacggcaccggcggcgagtcgatttacggcgaaaagttccccgacgagaatttcgacctcaagcatgaccgccccttcctgctctccatggccaactccggccccggcaccaacggcagtcaattcttcgtcaccaccgttcccactccccaccttgatggcaagcacgtcgtgttcggtgaggtcatcaacggcaagaacgtaattcgcaagatcgagaatatgaagacccagtccgacaagcccatccaggacgtgaccatcgtgaactgcggcgagcttaccggcgaggactacgagaacgcggccaagcgccaggcggacgcgacgggcgacccatacgaggacttcaccgaggaccaccagggcgaggagcttactgcgcctctctgcttcaagatcgcttccgacctcaagggtttcggaaacgctgctttcaagagtggcgatctcaacctgggtctcgacaagtaccagaagggtctgcgctatctgaatgagttccccgatcccgcagacaatgaccccaaggagctgggcgagcagatgaaggcactccgattcaccctgcactccaactcttccctgcttggtaacaagctccagaagtaccgccaggctcagaactgggccacatatgcgctccaagtcgccgatgaggctaaggttaaggatgctgatcgggccaaggcttactaccgccgcgctgttgcccacgagggtctgaaggaggaggatgctgcgctgaaggatctgcacgaggcagagaagctggctccgggcgatgctggtattatcaacgagatcgccaaggtcaagaaggctgtcaaggaccgggaggccaaggacaaggcggctgccaagaagttcttctcttaaacggtttgaaattgattcatcccggcctttcttttgttccatcacgattcacgacgtggtcttctcgttcaacaatgacccatgatgtatgatatcacatcattcaagcaatttgccttgctcttgtgcgaagtccatactgtaacttctttttacatagtagactcctgtcgcatagcacgttaggctcaggtgtaggattactcaaatcatcggggataaaagttgccccaaaagtatcaaattatatatttccaagtatgacctggtagtaacgcactcatattttctagacggagcattgcaaccaggtctaggcgacccgctatactaatgataagcattagcctgtgtttcagaatatattggctactgcttcagtcttgtcgatcatatgttttggatcacgcctagtatcgccttaggcgtttcaagtcctttctcttcattttctgctcggattttaaaaatcaggcaatgagcaatgcagatatccactatcggacgttttatctgagacacagttggggctgatttaggtggcaaccagatatcgtagtcaaccgtgactggcagactacacagaaccttctgattggaggccaggtggacaaatatcggaaaagccaagaacaatcacatataaacagatcgattgaaatatccaactaaaccaaacttatatatccaacttctcccttcattcccatcctacttggactcaaaagcgcaagttcccatctctagcttgaccacatccgcctcaggccgaatatcgaaatcaaagatatccatcggcaccgaaagcgtagtacaagcattcggaatatccacaatgccggcaatatgcccctgcaccggcgcgcagctgagcagcaaatatatctgataatcactatagccatagcgccggagatactccataacccggagacaggtctgtctataggcgactgtcgcatccaggaaatgctgcttgccatgctcgtcgacagagaatccctcgaacgtcaggtatcgcccagggccgaactgcggctctacaggtcctgcgtggaatattggtgacttcatggctagtttcgccatgccgtctttgatgacggtgaacttcaatgtgatcacaccggccatttcaatcgccccgcagaatgagatctcgccatcgccttgcgagaagtgcaggtctccgacggagaatttggcaccggggacgtgcacgggaaggtagactttcgatccccgggagaggttcttgatatcgcagttacctccgtgctcggggcggccctagtaaacgtgtgagttttggttcggttttggggtatattgtcatctctcactgggatggttcgagcaccctcattcgcgatcttgctcttcacgtcatcaatagcactgcctgcatgggcattctggggattcggtggttgagcgacaatttgatccgcaatagtattggctgcaatgagttcgccctctcgacgattccattcagccagaacttcggccgagggagcacatcccagtattccggggtgaatcagtcccgcaaaccgaacgtgcggaatatgccgggatgagcagaagattccttcaaagtcccagatcgcctttgctctgcgatgccgttagcatggatacatgttatgatattacatataattaacatacgcctcgggatacagtcggtctaggaaacctcctccattctctttgtggaatatcccggtgaatccccatggctggtcttcgaatggctggacatcctggatctcgacgagcaagacatcgccaggctccgcggtttcgatgtcgaatggaccagagaggtaatggatttgggttagatctacattcctgatatcgtctgctgagtcgttgtttccgatctggcctccggtccaatcgagacattcgatcttgacgacttcattgttggcgatttttccatgagccggaactggacgtggaattagcatgcatgtctctaatgggaatatgatcaagggacataccatctggatgccatctgttctataaggaacttagcaatatcttacgacttcaagaacgcaagaacatacatgtaagccgggttgttcccacgcaggcttgtcgaggtcgacctttagagcagtacggattcccttgatacccatatttgcttttatccaagggtttgttagttgttcgacgtggttgaggcagtggctgtaggctaacaagagtataatctcgggctttggacaagctgggacccttaaatagactgccatatcccggcccctcttacgataaggtcttgccccgcagacacccggtccattgacatgttggcgtgaataacagttacgtgaggcgttggagaactggcttatcgctttatctcgcagatcaccccgacctcggggggtctgataagcttgtacttatgtacccctcagggacaattggagatgaaatgtatttttgtaaacaaggcctatttcggagggcaacaatgcggggatggtcgccttatatgctaataattgatggtgtctgtgcaatcgcaaggccatatatgctcgaaaaatacttgccgtgaagtcttagtgctgacagctcttaagaaaacctctttccaggagagataggttccttctgatctggctcgtccgtgtcgacattgagtttgtcaagattatcgagagataagcgcaagaaatcatgcttgttcttccaggtaatctggctttccgcgaaacctgtactctcagcaggaggtggaggcgggtcggttatcttggtgacaaggtacgctgtagatgcctcagcaacgccatacatcagcacaccaatgtacgggatacgcagagcaaccgtgaaagcaaaggcaaagccaaagagaacaccttctcgatcgctgaaccaccggcgcttttggtcgggggtgaacttaatgcgccaaaagtagggttcgagctagagactgttaggataattcaagtgcggaagggtaacttgacttacaagctcacgcatcagactgcgcgaagcaaagtaggtgtgaagaaaagtgacaatgtaatgcttcggcagaatcaaccctatgccaaaaatgacagccgcgggggtggagccgatgtggcttcgcaatgtgtagaaacttgctgcaggcataacaaaccgaccgatgatcgcaaccatcgaaagaagatagacaccaagcattataccaatcttctttgcatagcggttgaagaatgacttcagtgctttggcaattggccgagaaacgctggagccacctttggcagagtactggacaagattggggtagtatagagagcggaggtgacgggggtcttcggatttatgtttctggatgtatgtagtgtccacccattgaatggactgcatgaaactagtgagacggtcagcgaagtatcaataagttggttgctaagagaatgtacatttcatctagcgtgggcgtcacatatcgcatcaaggtcatgagcaagaatggcacctgtaggacagacttggacataaattccaacccactgagaagcttttcgtcccagactgcctgttcaaggttgatcacccatgatacgaggtatatagagaatttcacgctgaggatcttgagttcaagtcagcgaaaaccctccgtgcggggcagtatagaaacatactggaatctgaatgatcaattggataacgatgccgatggctatcgcaagagctgcttggcggaaatggtcgtacttgaatagttcagggtttcctaatgcacgaacagctgcaaccctcagttagtaatggcctagaacgcgttcccatccaggggatcattccaaggcaaatgacaagatgtggctggttcaatgcagcacaagcacctgatcaatgttttggcatagccgactccaacgttgatagaatttcttgtgtagcctggaatccgccaaggtattccaacctaattcccctggacgttcggggtaaacacatggggtgacatactgcctactattgtgagctgaaagccgcggatcacagcgttcggctcgaagttcgacatcgttgctttcaatgctgtggaagaaccaagtaaataccaccacgtataaccccagaagtgtcgaaacagttaagaatctagcaacaacgcattcttgaaaatgagaccaaaaataactgtgggtgcctgctcagctggcattgaaagctgcgtcatgatcacctgatctcggcctaaggcaacagtgcatctccccgcgcaataggccgcgcaactgcagataagccccatctcctgcgtctcctgcatcggatacctggcttctcacattggtattctgtacaaacatgtttgtacattaatatctcctttgccccttatcgatcgcatccatgaaccatgcccgagtctccaagtgagctacactctctccgccgctctgccacccttccaaccaaattaaatcctctcgcccgacgtcgccccagcctgcccgaaaaacccccannnnnnnnnnnnnnnnnnnnnnnnnnnnnnnnnnnnnnnnnnnnnnnnnnnnnnnnnnnnnnnnnnnnnnnnnnnnnnnnnnnnnnnnnnnnnnnnnnnnnnnnnnnnnnnnnnnnnnnnnnnnnnnnnnnnnnnnnnnnnnnncccgcgcgacggggcgcgagcgtgccgaatacccccgaacatgtaattttctatcacccatccgcgaaaatcgttcatttctccccaagagccctcgcccctatcccatccagttctacgccgtccgacttcgactacccggtcgatactatcgagacactcccttggcgctctgcaactgagcgaacggtcgcaacagcgccactgaggttagagaaggtccatggctcgacagcgtttctgaaatgtggaaatgttgtccacgcaattctgaagaattcgcagtgttggtgtgtcgacggggtatcgaagtttgttctacgcattcgccctcttacatactatcgcatcgaaataccatacgagacagaagagcaccggagtttggtgcgggatctgaagatcgcattgccaacagtgcttcgatatgaagtcactccatgccctttcaaacgctctttcagcgttgagctcccgaacgacgcaatggcacctcggcgcaaaaaggcttggcaaccgaaagatcagagagaaagagtaccgaccgtcctagaacctccacgagagacaccatcaccctcttcaataaggtcggattgtctcgattccgccagtgccggggatgacaccgacggagacctaaccgatgacagttgtttcacttcaaacaaagcgagcagtacaattttggagactattcccgacgatcgggcatcctctcccgttgaggctttgagtccttctccataccaagggcctcctaggcggtcggtgactgaagtaccgcaaactttcactagcctgcttgcaaagtttgaggctacgtcaggcgcagacgatgaatacgatattgatcctttgctcaagccagaatgcgcatctagtactgatgctgcacttcaaattgatcatgagctcaaggttacagaccaactcgaacctgagtttgtagccgatagtggagttgaagccggacccgaatccgaagctgtcctagattctgaaatcaaagccgaagcggagcttgagaccaagtctgaactcgtgttagaagctatatcaccagccgaacccttcaaggaatctgcagttgaagccgagcccagcatcccaattgagactgacgcagtgttggcggctgaaacttcagacgaagttgtattccgtgctgaaactaccagtgcagtggggactaaggcagtgctggaagacaatctcgtgaatgtcgaagaagttcaacgcgtgcaacccactgccaagctcacactggaggtcgaccatgatgcatcctttgcgtccagtcccgagtcattccattctgctgagcctcaatcgccggattcagtctctactcatcctacatctgtgggaggccccgatttgcctgaatcagaagagatttccaacctttcgagcataaagcacattatttctggattggaagcgtcagcggatcagtgtaagacgccacagcccccaacactcggtattcctcaaagcgacaacgttcccaatccaaccagcttgcttcatcctccatcaatgcatagcataagctcgaataatgtgcctaggcgcttcgcagatgcgttcgcagacacctcaccctcaatggcccctacaaacaatggacaccgacccagtcgttttacggatgtatctgcggacacggaaccgcggccaaacattcgtgccaaggtcgctgctttgaacactgatctcgaccacatgagttccgagttccggcgccgggcaaaagccacaagagagcgtgacgtttcccctatgcctcattcttcggcattgtaccagccatctagtgatggctcatcatttatttccaaggctatcaccttagtattgatccccccggcctatctttttgtcattctccttcatatcgctgcgcgcattgtcatctacccaaccattcagccgactatcagctccccaccgagtgaaccaaattctcattctcagccaaaaaagaaggatccagccacagaggatgacttcagctttccactggaacctcaaacttcctcggaatatgaggatgctgaactcttcagaaaactcgacccttgggatctggactagttgggtggttgaaatgcccccttttaatttgcttgctctttttttcttcttctggatcttcgtcatcctacgctcggtttaatgcttactctttgtattcctccctctttacaccatcttaatgtttctcttgttatgatatttggcgctgattttgcacgactcatgggtggatatatgacatggtttgtattctactgaacttctgtattctagcgttacgtgtatcattgaggtgaaatccggggtcatgtcagaaacgaataattaattgacacaaatacgctctttcaatttccagacggttctattccatccaacgccattgaccctctactgaatctgaccgaagtcgtcagagatgaaacctacgaataggggcatgcccaactgtaatgctataagccgttcatttcttttcccgtcccacaggactcgtataaacagacacgcccgtgagccacaagcgtaggggaatatgtacacttgataggaaattcgcattgaaaaagcgagaagaagaagccagaaccaccatcgaacgccagctaatgcatgagaaaacgaagccatgacacacctcgcttgccaggtccaagtacacaaagacgaagatgccatttgggaaatagaccgaagagcaaatctatgcttttgtgaccttagcagctccgcccttggtcttggccttgcggcctcggcgatctcgcttcttcaacccagtcattcctgtcttgcagacctcggcatagcgaacgtagaaggcctcaatatcatcggggctgacaatcgtcgagagcttgacctttgatgcccttttcatgctgatcttggttgcctcgcttgcattcttggggttcggtgtattggtgtttccatcagttgctcggatgaggatagatggttgggagtttgtggtagtggcgccgggcacatcgatgagaggtttttgagtgagattgaccgagccatgaagattttgggaggttttggagagcagatctgcaagagatttgaagaactaaagatgatcggtgttagcgatatagctcggaactggtggtcgtggtcgcatgcgcggaggtgtagcggtcaggtaaacaccaatatcaatatttacctcgtcgtgtcccaaatgtggggccatatttagagatcttttatgagccgcgcgataattaaatgatccgaaagctggagcagatgatcaatatacagttgacagctgggcacaactcacagtgggggagaaactccgctgtgggtgcctctccgcctttgttttggggcagcagaaaagtgaaaaaagttgtctaccgcccggcgtacctgatagagacatttgaactcttcaagagcagacgaaacatcccagaggaccaagatgcccaaaataccccgccctcggcataatacgacggccttgcctcgggatctgcgatccgagctcggaatccgcgatgtctacggtgacaagaagcgccgcctcaatggacctgcctcgcgcaaagaacgccgccaaaatgagcgtacgcagaagaaatctcgacatgcagccccgccgaacaagaagaccttcgagcatccgcagcagcgacttcagcagaaacctcgacagcaggatcaggaggaaagcgacgaggacgaggatctcgatgatatggatctcgacgagggtcccagtgtgcagacaaagtccaaatccacgaaagacgccgcgaagaagcccaaatctattctgaagaaagcagcagtcaagcaagactcagagtccgagtccgagtccgggttcgggtcagaaatcgacctcaatgaggacgaggatgaagatgaagatgacgagtctgaagatgagtccgaagatgagtctgaagacgattctgaagatgacatcttcgaggatgaacccaaagaaaccgaagcccacatcccaggatcggtcaagtctaaattggcgcaagacgatgctgagattgctgcattggagaaaaagcttggcctcaagaaaggaggtaaactaccaaaggcctttgaggaggatggactagacgagttgctaggggatctgggtggcggcggcgatggctcagaggacgagagcaaaaagcgcaaacgagaagccgatgaatggctacgaagtaagagactcaaggccaagagcttgcaagcccaacaactcgaaaaagacgacagtgaaatggatagcgctgaggatttcgatctcgacgacgaaatttttggaggcgatgacgccgaaggcagtgattttgatggtttcgacgaggaagaacgcaaagaaccaaaaaagaaagaaaacccatatatcgccccggtcacgaaacccgaacccaccgctcagaagtatatcccaccttcattacgaggtcgctccgacccggaaagcgaatctctcactcgtctcaagcgccaggcccagggacatctcaacaagttgtccgaggccaatatgctctcgattgttgccgaatttgagaagctttaccgcgattacccccgccaacacgtcacatctaccttgatcagcctgctaatgggtctgatttgtgagagggctgcccttcaggacacctttctcattttgcatgctggtttcattgcggcattgtacaagctcatgggaatggacgttggcgcggagattatccaaactgttgtcgaaacgttggatgctgatggcgacgagcgtggaaagttccagggaaaagaagctactaacttggtctctcttctctcgcaactttacaacttccacgtcatcggttcttccttgatgtttgactacgttcgtcttttcgtgcaggagatcacggaatcgaacaccgaactcttgcttaaggtgattcggagtaagtgatatacctagcccacgataaagctactagccatctaacatgtcgcagattctggccctcaactccgactcgatgacccatctgcactcaaggatatcgtattgctcattcagcctgccatcacaaaagtcggcgaggaccgtctgtctgttcgaacaaagttcatgatcgacctgatcacggatttgaaaaacaaccgctcgaaggcttcagctgcagctggtgcaggtatcaccacagaacatattaccaaaatgcgcaagattttgggttccctaaacaactcgcggacgattcgcgcatccgaacctattaacatttcccgtgaagatatccacaactcctctaagaagggcaagtggtggttggtcggcgcaagctggaaggatgatccccttgtgacagcacagcgagagatggctggtgtacaaatgccccaacctcaggtcgaggatgatgacagtgacggcgaacctgactttggagtcctcgcccgagctcaccgcatgaacacagacgttcgtcggtcgatttttgttgctatcatgtctgccaatgacttccaagatgcgaatgtccgactcatgaaactccgtcttaagcgggcacaagagtttgaaatcccccgtgttctcttgcactgtgccatggaggaggaggcctataacccctactattctctgattgcgcgtcggatttgcggtgaacagggtcgacgcatcaaagtgtcctttatgtttgctctttggaatatgttcaagaagatgggtgagcgaggcgatattgacgaagacgaagacaacgatttcgatccggacgatgaagaaaacggtgttagcatgaagtccgtggtcaatctggccaagatgttcagcgccctcatcatggacggcagcttgacattgagcattttgaagaatctcaacttcgcctatctgcagcccaagactaagacgtttgttgaagtcttgatcatcagcatcattcaacaatctcaaaagtccaagacgaagaagaaatccaagaggtccacgccagatgagcctgagaagaatgaagcggctttgatgcaaatcttcctacgtgtcaaggaggcaccgcacattgccaagggccttatcttttttgtgcgaaaggttgtcgcaaagagtgatatcgtgtctcccgaggaactaaaactagtccggtggggatgcaatgtggctacagatgcccttaaggctgtggcggactaaaagttgcattggattcatcttgcaattgcatatagaatatacccaatttgttacgctgctcctgatttgtttatgttccacgcttgtcccgaacttcgaaatcgccattgctcatttcaacaagagaagaatgaatcagtgatgtactctgtaccccgtacggagtacaaatccagcatttccaatgttcacctatcctacttctactgttcgaaatatatgaaatttctgggctagacttccaaataagacggtaaacagaactggtggaatagtaaagcgaacttgttgagcatttccctccacgaggagttctgcataccgtcattacaattccgatatcgggttgtttattgttggatgaacctaaatcatctcttttgcctggaaaaatgttggtcgttgagatttgggtgtttcacatggaccaagggaactttatgttgtcgggacataaatcataagccatgataagaacttgtatgtaagtctatgaaatataatggaagggaaatgatacacctcccttataccgatataaatcgccgttagtcattcagctgctccaatgaggtcccattccatggctatgagccagccctcttttgtctctagagatgcgccattgtcagatggaccacgctccgaaacgtaaccagatacctgaccaggtgaccgacgttcgtaggagtcattcccgagctccaaactccagttgagccctttgtgaatccccactaaatccccttttcgcagttggggtgttgtaattgcatcagaacgcgagggattttgacgcacgacggatttagatcgggaagttcccataatcatgatattcaagacaggatcaggatttctcccttgtatatgattcccagtaagtagttccgcttgaagaaaggacagagagccacagccactcatagatgactggctgacatgaataacacgcgcagttaggagatatgcattcggcttttccggcgagtctgaggcctggcccaagggaggttttggaagctggtcacgtttcgtccccatttctaagatccaaccgcgtgcctcagcggccattccgccagggatgtaattggacacaccggctcggtttcgaccacggcgatgcagtgtgcgcgaggaaggagagaagggtgcagggatatcctctgcatccggattcggcgacggcgagcgaggcaaaacaaaaaccggttttcgtctctcagacggcgatatgcctggttcgtctagtttgaatctgggcgcggactggctgctgggaggcctcgccgccgaggaaagcataaatcgaggacgactgcggaatggtgttttcatattgcttggggtcgatgcggcttgtgcaaatagacatgcactcggtgcgggatttctctccatacccatgtcccatgccgtagtgctttgcctgcttttatcagataaagcgatgggatcggctggaggatccacggattcgggtggtgatgacaatattggatcgatatgtgtcagatttcttcgatgggagggtgccaccccctctacacgacgccgtttattcccatccctgaccggcgaaaacagcgcgtcgaactcagcgtccaggattcccggagtctctgcttcttcggggggagtgctgtttatggcatcgtctggtagttcgtccgcatctctccctccggtttgcacatctcctatgcctgcggcatcatcagagtcctcaatcacgtcgcgttgttgacgcgagccgggggcagtttgggtaacaggcaggttactcgcgactttacgcgttgaagatggcccgtcatcatctatgagatcaagatcatcatcttccttctgtgcgacactttgtgatagtagaaaccggggtgtggaggcgaactgagggccactgcggcgcgtggatgggttgcgacgggcgaggcggaatggtgatggagtctgtggccagtcacattagcctggggattcgataaatcacgccgtagacatactgccgggaaaggcatttatctaaagtatcagaattatggagcgaacaccatggcgctgcttcaatgcacccagtcggatagatctgtagttaactactccgtacataaaaagcggactgatttctcaggcatgtaaacccgcttgtgaattagctactaaacctatttaggaagtaagttagagcttcagttcatatattcttcactccaggcattcctccttcttttatcttcttttaccaatttctaatatctgagctctgcaacacaaccttgcatctgacatctctttctttttttccctttcttaaactcaagtctcaagtgttcacaactcggctcgtccttcttgtcctcgctcctatctttgacctaactatcagatccctgctcttgtggcctgtgatactaagacaccatcctataatgttttcaagcaaaaggcgacgacctaacaaagaataatgaacgtgatcctcgacttacaagatcaagcgcacaagctctccttctcccagctaaaggcgtcaattgcagttctcgcatcaacaattcaaggagatcagtccgagctaccgacggttgcaatttctcctttgaatctcagtgatgtccaagttatgctcaagttgaaacattcactgagcaaccttgagttccgcaacaaacctccggttgggctgtctccgatctgtggtacgtatcccttagggaatattcaaaataaatcagtttactctcacttatctttcaacttctaagaggtattatactgattaatcgtcacttattgagctatatatagataaaattcagagaaatccaataagagttatagagatcagtttgtttgcaaagtggtcagcatcagtcattctgcacgtgacttatctgagcatgatcactgatctaaacccgtgctgacatctaacgactcagtgaggctgagcctcggcaccctcataagagcggcggcagcacaatcaaatatgaaagccccaccccagctccggtatgtataatgacataagtctactgaatgtagacgcaggtgaacagtaacaaccaatggatataactacctgacgaattatcaattagggctcttaaatgatatcgatattccgatcggcgcgacttggcattaaaagatttcctaccttttttacctgtatccctgaccgcacatttggcctgtcctgtgaagagggatcctagatttgtcaatatgaagtaatctaaattaagggaattgttgctcgtactagatgcttagattttcagtacagccttcctactttggtcgagtacctgccttaacacttgcttctccctactgctctcttaccgcttccaaatttgtacgcggcaaagtacggcagaaatttggcagaattatgagtggtaccagatcaggaaggcggcattggaatttcaggccgcggctgtgagcattagtttctcatgattttggagcccataggataaaaccccttggtcatgtgacatacacacacgaggttatgatttaattgcttcgctttgctccgccattactccgtactgatactaaggataaactttcgcacctaatcgtgtcgtgtgttggcgcctggcaagtacgttatgtacacacatgtatggttgagatagctgtcttaccgccccctctgtcccacataacgagagtttctcacaaaacgagagtttctcacaaaacgagagtttctcacaaaacgagagtttctcacaaaacgagagatttctctttttaggtatctttcatatggtatacccatacaaaaggtacataaacatgaattagagattttgtcacttctaggaatacttacaaaaaatatggtaggtgatatatagtctaaaggaggtctattttatttactattaatatattaggaagaaatattgagtattctccaagtggtagaacgttgatgtttctatatacatctctttcgtaagtctttacttttctgtataagatatctgaaatttattttattagccaattagtttaactataaatttattattgatttatactcttatttctcctttaactagccaaagggtcgagaacatgatatgaggtatatgtaccttttgtatgggtatgccatattaaagatacctaaaaagagaaatctctcgttttgtgggacagacccacccgccgttgatagggtggagccggtcttattcttgtaatgccaagatcggaaaatcgatatcatttaatagccctaattgatgattcgtcaggtaaatcgttggaggagtaattctacggcagatcttctactttctagttatatattaatagagtattaatcttcttcatatccattatcgattcttttcataatccgaattgatcattcgtctggtagttatatccgctggatcgggtcgttactgttgacctgcatctacttgcatgctgtctgggctactttgtcagggctactttcgaattacgagtattaaaacttacttatttaaacccttcccagctcatagaacttggacatgatctctctttggaatatacccatcttccaaagctttctctatatcgacttctcattgtctttgtggcttgattcatttgctttttgtcaattcctttcgtcatgacacacgcttcttccaacgaccatctcgaatctttccctgttgagaattatggtgtacctcacagtatagcctatgctcaaaatacaccccaaggcacacttcactatctcgaacaggacctcccatttcaaagttctgtctatggtcttccatgggccttgaatgacttcgacctaaacatgccaattacatcggcacaagccaacatcgagtctcttactggatctgttagagacaacgcctccccattcggagcagagaacacaacgaatagtgcctggatggactgtgacagctctgctttggatggctatcagcaggggctcttttcgctcccagcgggagaaccattgaatgagacaccctgtgagggcagtccgactgatgaccgaacgtctcgtaggcgtcgctctaaacccaacgccaagtgagttcctccgatacagatctctacccctatcccatatctgtgtttatctaatcaatcaatcctccaaaggagcagcactggtcctgtcacatgtggttgggaaggttgcacatacacactcccgttcactcatgtgatatcgttgtggcggcatatcaaggacaagcacatattccctgatgcgttcaagtgtccctctccacaatgtggaaaggcatatggtcgaaaggacaagttgcagcggcatttgcgatcgcatgcagacgcggaaggtagaggtaaatgtcgttcgtgccatacatgatagtacaaaggttattgataatctcttgtctcttttttttaattttgtacttcattttcttaataaatcattcttttatacggtcctaggagtttctctagagggtaaatggcgaatgttaggtagtttagatatcttctctaaaatcgtttccagatattctagatataatgtagcctttacgatgcttagcacaaaacaaggtggagggcccaaacgaggcactggaaaccgtgaaacataattccacatagctgaaaggaaaattgtgacgtaggggggaacagaaccggagaaattagactttattagtcaacctgtggtcactagttaactagttaccaagttactcttctaccctcccatttattttaccctttgtccccatctccaagatacctgccatggattcatcaatagaatatctcaccgatcttgaaggaacacaggtcacgtttgatgccgttgcagaaccaccgttcgagttccctgcccagacatggatgatacttgagaagcttgaggaagagtcgaatcgcctgacaatcgaggacattgtcgcggagctcggaccctcagacaccgcggggaagttcctatgccgacctgccggtgaggaagacgataacaggcgcgcatttttgcgcatttatcaacagattcctattgctggaactgaaacgaagaaggccgccatacggggtcgccaggccgtcgatacccctcccgaccactcagaactgattgctttccagacattcacagagctaggttgtgacgttgttccccgactgctaggctatcaacagcgccagcaagaccacgacgagggtgttcctgggggatacatcacgtatattctatgggaaaaagtgcccggcgagtctcttaacttgaccggattctggaggctatcctttgccgatcgccaagccatccgcgataaatttcgtcaagtctatgagtatgattgattatctagtgaccactgcgaaatattgggctaacagagagcagaaggtttttgccgtgcgggtacatgccatgtatggctggtccgtcgaaaatcatttatgacaagtccagtggtcaaatgtatgtctatgcaagattatctatggactatgatctaactatctctaggcacatctgcgggtttaaatccgcatctccatttgacgaacctcaacagtgggatgatgttaactacttccaatacggattaatccaaccctccgatagcccgttctactgggaaggaacaccacccggaacggcggattggatcaaagatgccaacggctggacgtggtgaatatgaaagaaaaaaacacagcgggatacagtatgaagtattatctggcttagtagaaaaacgcaaagggattgttgttggtgtaatgaaggctgtgtttgctatacacaagtatgggcagtatactatgatcaacgtcatatggtatttaatgcgaggattggaaatcggcccctgggtttcagcaatggtagcaagatacgactaatgatagtctcatttattttcatgtgtggtccgaaggccataagtatacaaaaagcccatgcaaacacatgtgccaaatccagtaaaaatataaagaacgagcttacatcttctgaaagtattcatcgaaatcatccgcagcgactttagcgcagtcaaagccgtagatctcacgctgcacatcggcatcagcccacttatcaggcacaggacccttgccagcgcggagggcagcaaactgcttgtcacgctcctccttggcagcaccttcacccaagtgcagggcacgaccagaagcggtagccatgtcaaccaaagcctcagcacggctcttgcggactctctcgtaaacacggagagccttgttgatagactggggagtggtatcagggagtttggaaagaaccacaccgagaacagctccgtcttcaatcgcctgggcagcaccctgagccaagtgcggtagggtagggtggcaagcatcaccaaccaaggcgacagagtcgagaacccaagtcgggagcgggtcgtggacgcgcagcttccactcgcagacctcgccctcgggaacgtaatctagcaggcgctggaccatggggcagaagtcagagaagacgtccatcatggcaggcttggagcccttggtggtataggtagcgtttgtcgcagatgcgaagtggctgtcgggctgggtggtggagaggttgtagatggtattgttagagacggggtaggcgataatatgacgtttttcgccaatccagcgggtcacacggttgctgtttatgagggctaaaagctcggggtcgtctttgatttgctccttgtggatcatgattcgatacgcggcttggtgggtgtccttgacgccaacgtcggcacccccccccctcatcctccccccccgnnnnnnnnnnnnnnnnnnnnnnnnnnnnnnnnnnnnnnnnnnnnnnnnnnnnnnnnnnnnnnnnnnnnnnnnnnnnnnnnnnnnnnnnnnnnnnnnnnnnnnnnnnnnnnnnnnnnnnnnnnnnnnnnnnnnnnnnnnnnnnnnnnnnnnnnnnnnntgctcgggccggccgggccggcccccccccgcttcatcatctccacgcgggtggcactcttaataccgtctgcggcgagaagcacatcgcactcgaccttgaacggagcagctccctcggcgcggggggtagctgtgaatgatggccgaggaccgaaagagtccacgtcatctgcgctgactccgaagtggaacttgatttcgggatgttgcttgcagccattgtatagtccattggatagtgatgcacgatggccaaccatgtgcttatatccatatgtcttttcaatgtaccgcagatccacatatgcgtgttgagtgtccgttgcgccgtctgcagacatagattagatcgcattacattgtttggttgggaaatcgcaacataccacgaactgatgtgtcctcaatattcacagcctcggcctcaatgcccttccagacaccgagtctatccaaaatgcgggccatgttcggtgctaattgaataccagcgccaacaaagccgaggtcagttgcgctttcataaacatcaatgttcttaaatccctgctgtgccagagccaaagcggaagtcaaaccgcccattccggcgcccagaatggcgatttgtaaatcttgaggtgctgttgtcattttatcggtggtgtgcgaagaagatatatagtaatgggtgttaacacgacaaggaactaaaatataccaaaggaagaatagcaggaaaagcagcgaagaatggcacaaagagtccctttaaagataaaatatccaacggtgcaatgcccgggtgatgctgccgaccatgtcttgcattttgcttcatggccacggcggagtaagtctttcccgcctctcccacattctccccacaagcccgttttgaaggcgctcacacggcttggggatttcatcattccctgcttggactttatccgctttaaaatttgatggcaatgttgtaagcgggaggctatcccgatgtcaacgtcaagtgcagctcatcgtcgtactgcagtcagccttattctcatggccaaatcagcaggggttttagacccacagctttgctttgttcctgcttttccttatacgattaacccaccctgaacaaccttgatatgtgtggaatcggtgtcgatgttcacctcctattctcagctccaattctccatgataacgaacatccttccccacagtttttaactccggacttaccccgggccgctcatcttgcggagaaagtctggttgctgaggctacaaactgccgataacttcttgttggacactgaggtaagaataaacatctgacaatcgaatcattctctgatatgagttaacgggaatggccattgcatgaaccgcctaagattaactacaacaagaatactcggccgtgtttgcggcttctgtcattcaaaacgacgtgatccagttagtcttctcagatctctgtcttctcacggtcgttaatttttataggcaaacggccgaaaaagagaaaattaatttgcgaaacgacttttctgtatgacctttgacttcagtcatggcttatttgtcaccaaacatgtggtctggaaacgtcgctagtaatggcgacacaatgacgtgcggtctcctaaccgtcggtagaagacgtgatagatcaatgatacagggagagagaggtaaatgaatatctatcaacatccatggatggtaaagatcgcatggcgaaggctcacgtatacagagaatcaaggaaaggactagaccccactcacagtagtgcgccatgttgggactagcgcatatcgaagtatgagtgtatgtcgtcgtgtatatagggaatagtgatcaatgagagagttatgttcccatggcacacttgtagagaggacctgcttatatagctggccgctccgtaactggcaaacaacatcacgatgacccgtacagtcatggatcgtatgagaggactggcggacttttgtttcgcgagtctcctcaaccttcacatattcttttgctgtattaatccgttattttgaaaaaaatatgggactttccgggggcatattttcattactcgtcaccccctaccaggttaagaaacgattttggcgagctcaagtagcgccttgctatcgagttatttattgccgagcacgctctgcgtgaacagacgcagcgcgaggaaacgctaaaccatagagctatagctttacaaaaggccatagctatcgatcccgatcccgaccccgatagaactcaacttgaaattagagaagcagatgaacagctcgaaaaggtaaaaagacaacgtccaaaaaaagagcaaggcctttaccgagcggtgtccatgcttagaccgacttggagagccgtttatgatagcataaaggatgatgatgatggtatatggtttatgtgtgaagaaatggttcaggattgctcggatcgaggcggatgttgtagccgggggtgtggatgctgtgcacggaggaggcatctctctaaaggggagaaaggcaagggccactgtacttcggagtgctggtgctgtatcagctgccgaggcttcgaccttcccgaggaagaaaaggaagagatcgcaagctatatgaagcgctggcttgaggaattttcctcgccttatcttcttaatatggcaaatgcttttttctgtccattaaagccgaaggtaaaatcaaagccgaaggcagaatcacagtccacgttacggagactatttgaaagagggtgaaactgacgttttaagtctcatgaaaaacatactttacttcagagatatttgctcgctatatctccccttagcaatttctcggttacttcggcacgacccaattggattatgtggttgtctagcattcaaataccgtttttatcattgaattatctctaatattggtggtactcgaattaatatggatagcttcatggtgccatatcatggtatggtcgtaagtcttgtgtttggttgacaagaccaacatgatgaagtggacgtggccctatatgcgaattcttgacgccggtcagaaacttgatcctatcgtatataatatcccgttactctatatgcactccttagaaatttctagatatacgagatcttcacctgattggcaagagctattaatatctccattgaaatgtgattgagctgcccttactgcttctatcttttttccaccatattttggaccgcgctgtttccggacgtattcgtgtctgcaggcaaacctggtccgctggcagaagccgcaaggtaaaagtccgttgcagcgtatgagtggcacggtacttttttgaacaacatcgtggtttcgtcttcatatacagacactagtaagagatccaaaaaggcggcaagatggagaatttgatctcaattctttcaaataatagaaacttcccatgaaacggactaatatacaaaccaacgtaacaaaatacaaccccccaaaaacaaaatcaaaaccaaaaccaaacaaaaatccgggtgccgaccctaatgtataaaagagaaaaggcagggaggatgggaataagcggatccactattcatgtgggtgtatgatagaaagtagcggcaaatacttctaatacctatagaataccttagtaacctgattttttttttatagtagagagcaaaattagactagtatagaaggaaaaaaatccggtgaggaccagtattatttttcttagtataatatataatgaagagggaaatgcacgatgggcagcctggccatgcaggcaagacgagaatgacacaacaataccaaccatccaggacggtcagctagtaagcatagggatcacatagaccacacatagtatacaatcgcctaatgcacaaacatatcgccacttgcttctcatttctggagtggtgatctgattaggttcctctctctccaaaactgtacttgacaaccgggcactcgcttttctctacctgaaggataaggtaaggccactaaacgagggattccgattttccccactgcaataactagtacataattagatagaggggtaatatctgtctataaatagtagctagataatctaatggttagatcttagaaaatacaatcgtcgcggattcgaatccaggtccgattaaatataatataattaaaaaagtagtagtatagtaaaatataggtaaatcaaagcacctaagtacctttagtagtaaacttagatataaaaggtaccttgaaataataagatatagataatacgagaaaagaaaaacccaatgtttttatatctactccgtataataccctcctaatacgtattggtagccaatacgctttgtctagaacagtaggacatgcagaattttgggaataccttttgggccgcaatactgtgttatgaccgtcatactacagggattctgatcaagagacccctccttccaaggaggggcatattaccaatcccctctcccaaataggtatcgaaactatactactatcatggaagttcatgtagcatatggattgtcaccgctagaaattctgaagtcattttccgccttgagcagcggataatttgcgtacttctgcactgccagatccaccttctcatattcttttgtatcccacccaacttgccatacatttcttcatctcaagcaaacttgctgctatccataactaacctatcacttattgttttcacccataccgtgcacatatttggcatccgaacgtgttctaacacgccatggacctcgatcatgctctgtctaccttcatcttccatcacatattcttccccatcagactcccacaggaagctgaacatgacctagttcagctggagagccgcctgatcgtggctgtgagagatgtgctgcaagatttcattcagaatgtcagccccgagtcccagcagcgatgggacctagctttgagtatgttgtttacctggatgaagttgcataccgagcagggaattttgcagagtggcttagaagaagctctttcgaaccttaaatttaccagtaagtgggttgtgttctcgttagatctttctcccctagcacattccagacggccccggtcgagaaaacgctgacctaactaggggctattgcatgtcacatcagagcccagaactgcggatgggtcgccttttacgatgcagaaaaagacagggttctcgtcgacgcatttgaggtgtcatcggaggatggatcaatactgtcctcctctggtgggctcatacgtcgattccccggagttggtgtagctatctcggcagacaagctgtctgatccgacattctgctcctatttggccaccgaaatatctcaattagcatccgaggaagtgcctgagatgctgccgaaaagcaaaaaagcgggaattgaagtggacgaaatccggaacacaacccatcctggcctggtgacagaaggcttgatgacacaacttctggcacttggtacacaccatgaagaaaaaagggttttaaaatgtgtgcgagacgaggtaaactggaagtctgctttattaccatggaggcggtctccagcttggctcgtcatccgagtcgctctgcagttggttcttcggcgatgcttcaatgaaacggaagggcgccttcattacaaaaacttcattctgtacttcatggcaacactggcggcaagacaaaatccgtccgtagcctcccatgaacttgtggattgctatgaaatcatgcgtgctcggattggccggcggatctgcaagctggaggataaagatgaagtcttttcatttgttgccaaccgtgcacactccgcaagcaaggatctgcttgacagattgatgtctattaaaaagcagatcaaaataaccaaccgcgtgaggattccgctgattccatcatcatcatcttcgcaagatgatgttcaccaatcactgcttcattgcaaggaatatcttcaagcggcgatgcgttcgtcgcctaatcaagtaaagcccacaaagttctgtcgaactcacacatccaacttgaaatggagcaatgacttgcccattccgaagatcgggtcgatcatggctctcagtgaatttgagcaatgggttgatgggcacctacagtcctggttcatcaatcaacctgcttcgaaacatgaagcagcgtgtcgtgaacttgaaaataccattgcgcagtacttttccctcgcaaagccgacgtacatctccaacccacaagccacgtcagtgatgattcttgtaatgttggaactgtgggtagtgctagacaaaatggctctacgactctgtcccctgatgaagaggttctctcctggaatccccgataacttcctcgaacctctactacttcccaagatcggtcaaatgaaacgggcgagggaggtcgagcagtacataaatgtgcggcataaggaatcggacaaaaccaaccctagcatcttctgtgacccagcaccaaattgctttggtgttcaatttttcaacagctccgaggaacaccaaatgctcgaatgcagaattgagcagtctgccaatgcaattagagcagcaaagcaagcggaatgggagagattaagtgctcaatacgaacgcctacacgaacaagagcaacaaatgtcgcattattatgattacaatggcgatgatgaatacgttcaccttccgcgggattgcccaaggtgttcactgaacaaacaaatcgaatctatctccattcgggttcatgaatggccacttccaacagaagatattgcacgaaaaaccgctgtattcgagctcagtattcccatttggtttgcatcatggcgcaacagtacctggagagttctccacgagcttggacgaacacttacagtgactactaccgatatggaagtcagatggcttgaatatacagagatccaaacattcgtcacgagacgcgagtcgaacattgttctggcctcatatacaaaatcatggcggaagtctcactacagatcgcacagattccctgtttccttcgattctgtttgcatcccaaatgcgcttcgcctgcgacttttcgacaacacaagaattgcctgggtgacaattcagaccaataaaccgagcgtcaagagcatgtgcaccatacaactcccactcggagtgtactcaaatctgcaatacaccctcaattccacttcacactcccagaaccaggtcatagcgacccagaaagactgcgataaaaagctcagcttgctagaatttgaggcttacggatgtcttcgctctggggaaaatcttcaatggggcaatattttgaggaatctggcatcatcggcattatcactgaatgaggaggctgttgtctcccttttcaaacaagccgcttgggaactggggccactatccggaagattaggctcaatcagaagagctgcacatgaagcctttgaggatataggctttggtgactgtctgctgcacctgttgcgagagagattggtgacgattgaaaataactggaacgaatattgcaccttcgatcttattgtcacacttggtgttcgtattcttgctttaaaaagtggatcaccgtcggttgagaaggtcgttgaattcctacgacaatgtcgggaggtggcgatggattggtgcgatcagttgaatcaaagtcttctgaataaagaagagaacgacgatcaaagacaacaacagctgctacttctgattgcatctacttgccaagccacgtatgatgttgatcctatgtttttggacatggttatcgaaacgccccgagacctcttttgtttcgtccgatgctccattttactgttcgagaactcacctccagaaacagacggtctgtcgcccaagataaagcttagcgtggagaattcagaaaggatccggtcactatcaagatcacggataatatggatgattatgaactgcgcgtctggattgaatgaagcaattcaaagtggcatgaactgtcttgaagtttccgggctttggaaaacttgctcggatacctgggtaactacggaaacaagcaacagtgcgcaaggctttgggcagcgactccacttcaattatctcacaggtgaacttcttgtggatggaaatcctccagggaggttgccagctcgctttgcgaataatactctctaccaacgcctcttcggaacggtaattctacctaaaaccttcatcatatctagaagatgtattgacttttctatagagagttatcccggtgatgccatcgagtttgcccggagcatcgtttgtcttgtcacacaccgttgagaattttgaagtaagacttatacaacccaaaaagccgagctacgatacacaatctgacaattgataggttcacttcgggatgcagagtgggaagcttttgatcaaaacccgcaaggggtctcaggtcttgcagcttataccacacgaggtcctcgagaaggacttccctagagtattaatctccgagaactttcattggctggatttggagactggggctgttgaattccgtccactgaaccagccatggaaaccttctgaccgcaattggcatttgttctttgattctaattcgccgggcaacatgctcatgcaacaagattccaagaccctagtcgatgtgcagagcccgcctttccaaaaaattaatcacatattgaaagtccttgatgcaagtgatgagattgtcgtcattcggacggctgttggaacactggaggcagaactaagccgtttacggttgaaattcttcgtcaatgataatggacgtgtaacgtcaaaggagttcggcgccctgattgatgtggaccaagacatcggctgtttctatggactgaagaacaaactggtcctcgttgattcctccaataatcgatcggtcattattccttacggaaacccgatgattagtagagaagatcatcatgttgcagtcacaatcgatctaccaaccggaaatcgcgcgaagtacatgcattatttcttggacagtcatctacaagttctgcgaggatttcaccctctggctatcttgtaccaggcgtacttgcacgcaatcacgtctttccctgtccctgataacttgactcatcgctcaggtaccgaagaggctatccgtattctacgtcaggagtgtttaaaatcagcattccctcttcaaaatgatgctaccgagaccctggaaaggattgcagcacttacgccgtgccgcagattttatcctcagcaccttcgtgtcatgcaaactatcgtatggtctagtaacttaggtcaacttgcccaacacgatgacttccagtccttgtcgcaagagattcttcagttctctgagcagttttcacatttccatggtgccaaaaagaaggaaaactgcctcttatacccggggagtattgatttgttaaagcgtaaccgttgccgcgccgagcagatcatgaggtcgcaattcagcgaatcccccactccatcaaggaagataaattacaactcccgcgattgtaacatcacaagtgctcgcagtcagaatgtgtatagaatcgcagctctgattcgagattggcctacgacagttggtcattcatcacatctactggcaaccatgaggcaattcaaaaacctagcaacgctctcagctgattttacccgttactcttgctctcaaatgctaaatcagtcgatggagagtgcctgggtgggtttataccacgcctgccagacaagttctagggctacgcacacctacttcttgatttccttgttttctatccttgcgtttggtgggaagattgaccagtcggtcctccgtcaattacttcaggttgctttctcggagaaatgcaaatatattccagtgccactcaactcgacgacggtactgaatctcagccttgggggggactttgttctttctcaaattcaatacgcaatcaatacttcctacacaaccttcactaaggtatacaattcacacctctcacgtgcagaacaagccaaaatcaaccaagaagccaaagccaactggtgcaaacaaagggccgaggatgtacggttgtgtggggactatatacgagctcagtggccgtccaaaactcctgtacttccatctcatgctctggttccactggttcgtagaaagccggcacatgaaatgatacacatgctttgtcgcgattgggtccaaaaccggaatttccttgacttcctgcgccgggtacagaaggaagtgccgccctccgacccttggtatcacgatatggatcctgttcccacctcccctgtccactttcaggagattgaatacagttcatttcagccaccctgtggctttgatctaatgcataggtctcatccagacccccctcagactccgtttgctccgatgacctatcgcggggtttcttcgatcctgcaatcaacacctgagctctggtccctagcaaagcatttccaagcgagctctaaccaatgtcaacaagagtatggaaacgggctaagtcaaagtgtccaagcgttagaggacttctcaacttcagaatctacgcctggtgaatctgaccttgctgcctcttttgactgggtgacaaacggagatgcggtacttcgacatcaagaagagcttgaaagacagagagatacattgtgggatgaaattgtcgcgaatttaaggacgagtgcaaatacaatttggccagatactgacaccgtcagcccttctgtcaccgtgtggtcagttctgtctattctggcctctgataagtggaccagcattcccatccagtggaaggtgttacttgtggcatttggaaagtccatctctgccctgcgtcgttgcgagagactgattgcctgtaccgaaaatcgggatatcgatggatttctcaaagaggcagaaaacccgggctatgaggggtgggaccctttgaactacccgacttggctgctgttggaaattgaaaataacattactatccggaagcgccaagttgaagttgcagctcggatgattaaaccggactgtggtgaaaacgcagtgcttcagcttaacatgggcgaaggcaagacttccgtcattacacccatggcggctgcagtgttggccaacggccatgatcttctcagaataattgtcttgaaacctctcttaaggcagagtgacgcgctcctttctcagcggctcgggggtctgatcaatcgacgcatctaccacattccattttcgcgacaaacggaactttcttctcccattgttagccagctccagtccttatatgagcagtgttgccgccagaggggtattctgattgccctccccgagcagatgctctcattcagactcataggattagatgctgtggagagaaaccccaatatcttctcgccactgatacgtcttgagaattggctgcaaagcaagtgccgggatgtcattgacgaaagtgacgaagtcctggatgtcaagttccaattggtttatactatgggaacgcagcaatctctcgatgggctcagttgtcgctgggagacgactcagaatttgcttcgcctggtctccatacaggcaaagcgtctttgtcaggatgatccaacatgcatcgaggttgatcagctaggttaccggtttcctattttgcgatttctgaaagtcgatgcgatcgaacgactgatcggttacacactcaagtcgatctccgaaaatggaatccccgggttaccatttacccaatggaattcacgggtcaagagcagcgtgatgcgattcattgaacattctgaacttgccaaggacgacgaatctttcatccgggaagaatttgacgggagtgtctttatgaccaatcttctcgttttacgcggactctttgcttatcgcatcctgcggttctcgcttgctgataaacgttggctagtggaatatggcctccacccttcccggtgtttaatggcggtgccataccgtgcgaagggtatcccatccgagaattcagaatttggacaccctgatgtggcagtgactctcacctgtctgagttactactacgatggactgaggaaagagcaactgagggactgcttcgtgctcttggccaaagaaaatgacccttcaactgagttccataactgggtcacgcagtgtgtggatgatttaccagccggtttacggacatactcaggcgtgaacctcgaggacgataagaccttcacccagactctgttccccattctccgctatcagaaagagatagttgacttctacctatctcggttcgttttctctagagaagcaaaggaattccctcggaagctctcgtcatccgcgtgggatattcctgcacggcgtggccttcaactgacgacaggcttcagcggtacgaacgataaccggtttctgctacctttgtcaatccgtcaaagggatcttggagaacttcttcacaccaatgcaatggtactaggcttattgctgcgagaggacaacaggcaatgtatcctggcgcaggatgaggagggccgccagctagatgttgatcggctcctgaggcttgtagtcagcaccggtgaaggctcacccacggccaagcctgtacgagttttgattgatgttggtgcccaaattttggaggccgggaatcagtcagtcgcccaaaaatggcttgccatgaccccggagggagatgttgaggcggcaatattcttcgaccaaagtgatgagactatggtgattgaccgggaggggcatgttgagactctcttctcgtcttcgttccgacaacgaatgggggcttgcttggtattccttgatcaacaccactcgcgcggtgtcgatttgaagttaccacttgcgacgcgtgccgcagtcactctagggccgagactaacgaaagataggcttgttcagggtaagctgtgaagtccagatatctttcaaagccagtactaacttcctctcagcctgcaaccgacttcgtggccttgaaaaatgccaatcccttctatttctggttcctccagaggtcagccacaatatgaggtctatattggggatatcatccgatagagttttcacttcagcagacgtactaaagtggtctatggctcagacatgccaggccctggacaatgtacgcccgctttgggcaaaccagggacttcagtaccacaagaagatcattctttgggatttaatagtgggacaaagtgacccctccacgaagtctaaaaccgctagttctatacaggagcctgaagcccggacactctcccagctctacgcaccttgggacgaggataggcggggtaggaacggccacaagatgcctgaatggaatgtcaacaatgagcaagttcaggagttgttgaaaactttgcagtcaacttcaggtcatatcgcgacttctgcttaccttcatgaggaacaagagagagaaattgcatgcgaggtggagcgagaagaacagatttcacggcccccatcatacgagcctgaagaccacaacctccacgacgatatccggtatttcgctaatttcggcaagttccgtgataagaaaccatccaaggctgttacattggctttccaaggtctggaaaatacatctgctgggaaggagaaccatccacatctgcttgggcctagattgtattccactgtggacttcaaccaaaccgtgaaaatttccaagaataatgtcatggatgatttcagcaagcaggtgaattggattttatccagtgtccacagcgatgttctgattatcgtgagtcaatacgaagctaatgagctcatcaatatcgttcgcaaatcagagaatgtcagacttaacatctacaccccgcggctaacgaagcccatgcggtcgttccgccaccttgacttctttggcgttggcgcaaacattccaatgcagcctgacgacgcaatgacacggtgtctggagatgttctctgggagcctttacttcggctcattcgaagattacaacaatttccgttccttcttggggcttcttacggataaccttggtggaattccagacgatgccatgaccaatgagggattcgtcaaatacatttcccgcaggcaacttcaatggcctatcgactcaccctttgttgaaaatccgcttccgttcctcggtgccctgattcatattcgaaccaaaggaatgggataccaacaatctcatgtcggcacactcgtcaaagccatgccattgagtgctgaacgattttgattccaagcggaatgttcacttttcttggcgtccaatgtttggaaaagtttctcagtttgaaccaatttgtttttttttttttttttttggcaattcttttgatgtttatatgttgttttgtggtgctggtgactttcaggccttctagtttcgagcttgctgcaacggtcctgccttaggtagatttgaatgttattttatctccttctacttcactctcttatgaatcttccctagcgggagactcggacgttaaatgcatattgtaatgggggattccagtgcaggttgactgcaaaggggcagagcggccaaaggtcaaagtcaaatgcctgaatgtgcctagattctgcctaatttcagactggcagaaatgaaatacgtgaattaccatgacagagggcttgatcataaagagaagggattgctaatttgacacccccccccaaaaacctattctgccctgcaacttcctaatcgggtaccgcttttccctcgacgcttactttcatctccgcgttcgatagttgccgccttctgattttatataccgctttcgtgacaatagtagtaagacagcagatacctaaaatttgtatggaagtctaacaaaatcaagttatatttgtcatagtaactgcttcatcaactactcccatctaccaaggagttgattcctatagaaactaggtagaaagaatatacgattttttccgatgaaactgcatgtttctttactttaccgagtaagccagaagctggcagaatatatagtcgtaccgaatatggaagtcggtactgaaaattcaggtagagtagaataggttgagagggtcaaattagcagtcccctaaagagaaggaaaaaagaaaagaattagaaaaaaaacttcgataaggaaaatcaaaccccgatatttgttattcgaaagtgagaatatggtctcataggctaaaagagatatatgatggaaaccgtacagcgcattttaccactctttacaactagaccataagtaccaaggttcctgtttaaggccctatccaatatcaatgatgcaattattatcgacacatttataatagtatctcactcgcaaaagttttgcacattcctacacattacatccttttacatgctgtatcggccctagcaagttgaagcgaggaaaaccacttcctcttaatcatgaggaaagaacgtttgtattcttattgggaccgtgagcctccatgtgcgtcttgtggcactggctctgatgaggtacaagacggtaagctctacccagttgcaacttgacaattatatcgcaatagatcactgaagatcagctcaatgccagttcgagaatgtatcgaagaatgttatggtgataaagaaatacctgaatggttcaaggattggaaggatgacctttccaaatcatgcgtgttccatataggctgctggagattgttgatacaacatttcaacaacggggttgttcctctcgataaattggctaaagtagtcaaagaagcaccttggccacagtatcgagcctgtaagtcattgtttacttttcttataggtttttgcatccacgagcaatttcaaataatcaatgagaacttttagatcatgtaatcccagacaccgggacgcctagctcgagatgctttcgatatatcgggttccgggccgaatcaaagacctttccaaaggcagaaaacatggaatgtgaacatcctctgaaggatgagtcccaagtgaatgactgctttcgtctccttccactcgaaatccgcttcgaaatcgcctatcttcttccaacgcccgaatacctcagcttaagacttgcgtcgaaagctatggttcacatatttgaaaaccaggaattctggaaaacacgcttcttcattcatcgggaacgaggatatctcaactatctcttggaagaaggttgtggagactggagattaatgtaccgctgcactagcagactcaagcgtctagcccggacactacggtttcgaaggctacagtggcttcataacgagtggatcaaagataggtgtatgatgattggagctccaatatctacgtcgcctgagaatacagctcaatttgatggcctagtgtgggaaagagccgcaggaaaagtccaatgcgataggccttacaaatccgaaatcactcctccatcttcactcggcaatgacatctgccagcgatgtcgtggggtgcataacctattaccacctcagatggtcaccatctctagtgagctcgtggaaatcgctgtctccgtacttgctgaagatgaacattcatttattaccgggctaaaccttgtctacggcgaaagttcaccaagcattagccttggctatcaaatccctcaaaagcagatcaagattgatctccgtggtcagccgttgaaaggcttcgaagtcctcgctggcgaagggggcatccaggccatacgtccaatatttgaccaaaaacatggaataagccgtagcatgattggaaagccgaatgcaacttgcaaatcagtactacttaacccagatggagagataaaagcctttgcggggtatttcgatgtaagtcaaatatgtgctgttccaattcacatgcgcagcttactgactcaattgtagcactgtaggatggtacaattttcaataggttcattgcgtccagaatcattttgctgagcagagagacgcaaactaagatgtctagttagttaactaacttgctgagatttacgaaatctcagattctcggatctggcttctgattggtcgagaattttgtatcgacgtgactagggctagtcacgttactaccggccctctataatatctattcatgacttgctagtacctaggtagggtcctattaaatgtcatggccttctgccaattgctaccaatacgaagcgtctatttgagcctatcattcgatcgacctttctctagaggcctatggtatcgagaggaaggctttagagagcttccgggctcgttgcctcttagtaacttagatgtcatgatctaccatagatcgctatcatatgttttatttttgcttgctcgcttattatttgcattgtttatcagtttgcattagatggattgtttgctagacggctaagcgagatgtttgaggtttgcgacgtttgcaaagggacagctatatcaactggctgcctcccactccacatggcaacttgcctcttctttctctccaccctagttattttgaattaaaagcactcttcctctctgagacctggcacattacattataactaagatccccagctacgcggtcctatagtttgattattagcatttccgctttcgtacactgcatagaggtctcatattgcgagtatatactcggcaaaagcgtcttttctcttttaggtagtccggtgacgcgacagacttcaggttgcgagctagagactagactgccccgggacgttcagtagccgtgcgcaagagactgttcggaccctcgatacagaacccggattttttcttttccttttcgaaacccgaatccacctttttttcttcttttcaaaacttccaggtaatggtttcatggaatcatcgtgcgacaaatcatgctggcaagactgagaagttgacgttgaatctcggaaggtggtcttgcacgaatagcggcatccaagtgtcgtaattagttgaccggtaaactgactctagatctgggagaggatcttaatgttttggcggtatgtaaacgaagagataagttggtgttgagcctggacctgttgaatgttgaaagtttgaatttcgactagagctgctgaatctcgctataaaggttgacaaaagttatagtgcattcagcgcgaagctctggacgatattggtgatccattttgacgaagatccagaagaggtaggctattttttcaacatagatattaaagaggggaccctgtgacggggtcaccagggataccgacagccctgcctgtgaaacaggtgtaagagcaaattcaccactgggagtggtagggtgcttgagaggacaacaccatggggtgactactcagaagagaaggtggagggtgtttgcgttcacttctcagtctcgctagcatgatctgtcgcacaattatcccaacttacacataacacaacaatacaatttttgatcaacttggcgtgtgcacgacaactacaacaagattcagggagaccgtctccctttccaattcgcaggacacattccaattgttcattagcttacaaccatatctctatctctcgttctatatcattccccttcaccgaacacatgcatttttttcttgtcctgcttccacgtatctccatatactaaccccgagatctataacgcttgatcaagccaatgaacgccaaaaaaaacccggtatcaattcctctacatcctcctactccttcaaccctactcacgaataatatttgcatcgcctcttggccttctttcttttgagcttctcaacccgcctcgcataggcacggctttcacggttggaaagaaattcatatctttcctacaaccgaacgaagccgtctactttactcctagtttagccccgaaccattacggtgtttttctgctattagccttacgccagtttctccctatcaacataatatattgaaacccttcaatgtaccagtctggagcttgaaagttgcctgctactacacatttatcacatgcgacactgcccccagtgtttggcttgagaataccccgactgccattgccaatcatcctccggtttcgactcattctagtactcctagcagtactgctaaagtgagctccactgtagtcgctactcctacactctcgttcacttactgtctctgtccctgcagctctgtcctctatcgttactggcaatttgcccacagttgcaccgaccagtcgattgtcctccgttatacctgtggattcctcaccacctgttgtcgcaaacgcgcgtgcattctttatcattctgcatcagcgtaactccattcaaccgcgagatctgcagcgctttatcaagccaatgaccaccaaacaacaacttgatagacattactctattctctcaatatctcaactctacaacagctctcagcgagatggctgtaagtccatgagtgcttcaatgtatcagttcatgaccctaatatataagtacagtaccagacacagccaataatagcttcctacatagcgaagattttacctgggacccgagaggttgaagttgaccacctctggacaaacctcctcgcatattatttcccaaccacgcaaacctacggcgttgaacgggaagcctatatccgatctaggtcgcagaccagggcgaacgtttgcgtgagcacgctaagtgatggtaaaatgttcaatgtgattatagtggagaagaaaaaagcctcgacgtcacgaagtgctcatccaacgcccggttcttggactcatgcagagggacaactactaggctacatgctatcccgccgtgacaatcaagagaaagatcttcggcgtctatttggaatagtaggcattggaaggtacgttaggttctatcaactcatacgaggaaagaccgagctcgaagattataaagatggtgcgacctaccacttggataatgatggcttagcgattgagcgaacgattttagcgataaaaagctacatcgatagatatcgttgatatagttcacggttttgttgattgtttctttcgtgcttttttgtttccattcgtttacttttttaccttttatctgctgtcttcggtctgtttttttttatctttatggagcttattattaccattttgtttcgggtgctctttatagagtatcgtagtatatacccgttgaataacacacacgaattcgactagttcaactactcgattggccacacggcaactataggcagttctgtctgtgggggctataaaaccctatattaagcgctaatcatccggaccttagtagatcctactggaccagcggtactagaaatacatttggcgtttatttactgattataagtagctgtactccgcaaaaggcgcgggcttacaaaggcgcgaaaccttcggtcctgcctttgcaggtcgactaagcggtcacgtgatataaaacacccctgaggcacagatacttttcacttctttattatgagaaagaccttggtcaacttttcatttctgatgtctttgcatatctgtagggagacgtgacctcctggtctgctcccaacaacactttcatcctcatacaaatgaggtttcccagagcactccaatagtcaagtcgtcttctcaagatatatccaacaggttatgacctatgctattgaatcctctacatacttgcaagcttcaaatcctctatttcctccaattggtgccctgcgtcgcatactccacagtggggctctgatcccacaagtcagaatttccacgatctctattggccgaaatcggcacgtggacgtacctctcactttcaattggttaactgttgtctccactggccgttcgttgatttgattcgttggccactctatttttcaacccaaaattgtatgttttgtttgcactgcggtcacgttagctttctcgccctaatgccgattcattgaagcggcatatgaagaaatagaacaacataatatatccacacttacatggttgcgtaatatcgcgtgatgaactactcaactaaagctcttgaggggacactctcagcttaaaatagactataatacaaagtccaatacaacatcaaccgatttctcgcacgcagcatataggcacgagaagctgggcgaaacagatggctggattacttatgtagtatcgaaaatatctgagcttagtgagaatctttcctttgtctatttgactgtctagatttaccaacttgattcaggtaactgttgtttttggtgtcaaaatctttgttctttgtttaaagctcgcctatataaaagacgttttccacaagcaggagaatctgacttacattaccgtcagttaccgctcactccattactaaacaaagtcctagtgtcgttgtgctatataatatatgatcattcgtgtcgttggattggatatctcaaatatgatattaaaggtgcatcagttcccttaggccctagtgtgagcttttgccagctctcgacatgctttgcttgccattttttcccttcttcctttcaatttccatctacattagccaataaccgcacttccccttcttccttcacaactgccctcgccttatatatgatactagtgtatatgccttgatcatgtgagtctacaggcccctcacttactgacaacgtcaactcgctaactcactaagctagcctagcttacggcctcgctcccacaatgacgtctcgcttcagtcaatctccccagtgtttcgaagaagccaacccccacgtcgcgtgcacaaacaataatcgagaccatatactgctagcactcctccaacgagaacttgatccgtaagcttctgtgccattctcgggtcaactgcaatccggtgtgataataactgattgtcagttgatttttcccagtagtgtgctaacaagatatagaaatgcccgaattcccacttcggtcgttcggtgattccgagctagacatcctcatgaatctccgttatcgaaaagcgcgatctatctaaatgatatttcgagtgttcggagatctaccaccatgggaacttgacttttcacatttttccttttctgcaaacagtctgcgcaagtcaccgtcatgtggatagtaactggaatccgactcaagcgaagttgacattcgatgtcaagattgttagcagggacaagaaaatcggagagcttggatcgggcgtcttcagcttgtcatgccaggtagacggcttcctagagtcgaaatcaacctttcgagcacaatcaatcctcgaagcaaaagctctaaggcaattaatccatgaaccgaatgtctattggcaggagaccaaatggttagccctgttaaatgcgcatcctgagaagagccttccgaaggataggtaagcatacagactgatatcgctatatttgagtttctatactgatatgactattagtacgccgataacggtattcatctcacaccgttgccgaatgtttctggcctttacctcttataaggacgggtatagacaatataatagggtgattcgggaaagcgcttcgtgaagcaagacgaatttatcgaaattcaccgatataatccatattgtgacgatccgaagatctaagaacatgggtgtcgggaacagaaggtactcgtcaaccgcacttgcctggtctgcgttgcaccttcctcaaacgtaagtgaggaacaccctttgcatagcttgcagagaaggacacgcacaaaacccaaaggaagagcacgtagatagttttccttctcttttctctttccgtacttagtatttggacagaaatgcactcttttcctctgaactgatctggcaggtaacacgtatctcatcattaagaaggaagacgcaccgtactttgccaagctagccctagccgtcgctctccgtacgagtaaagaaggggacgaaagaatctaaggctcaaagggcatcaattgtgatacattcagttctcggctataccgaagcgcccctctttcgtaaaaattgcccttaactcggtgctataggtctacctgaggtctacagaacggcttcatgatttcgacgctcgccgaagagatgaacgtctatatacggattgagtcaagtcgatacccccgagcgataccccgaccgaagcaaacaggcagacatgtcgtggggccagtccgtgtgttgagggattttccaacggtctgaaagcagcatgggtcagcgaacgcaccctgtcggcctacttccagatgaagtcaaaatcccctagtaagatcccagacacagatcgggactttttttgacatatgagtaaagcgaatgagacttgagcaatcggtgcgatgggtggaatcacagtgggaataatggaaattaaacttcagtcagttagtcgatcaagacaattaaagtagtaacattgttatccaacaatgaattgtgcccatcaacctcgggccaatgacccgaatcgccactagccgtagcttatctcctagcgtcgggccgaactaccaaaaagcggatagccaagaatcgaatgacgcgcggctttctcgtatgttataggcctgtcgtatatgaacgttgctttttccgctcatgcagcccgatctgcgatctgataaaagtttccgaaagagtcaatttcttcgcactgctcctaccagagtaggctctcatcaagaatgcgaccacaatcgctcctcccgatactcggggttctagccttatcaaatgccctctcagcagccccaaagaacgtgtcgatcagcaatgagaatcacattttcaacgtcatccaggactcaatgcgtcaatggggatcgtctctgcaccacaatggcgtgtcattcttcctcgcggccgttcccgccggtacgcagttctaccatggaacctccaaggccagtccagtgaatggcaccgagtggttggcgttcgagcccgaacatgccatggtcttcgcccggccccgacgtggccccccgccacacctaccacccagtgatgatgatcccgagccagaggatggcagccatggtgagctgcggaagcgtgaacaccatggcccgccagctggtcgcccgccgaagatattcgatgagaatgagtccgggtatctgcatacgtatgctgcagccaaggatctccgccttctgtatcttgacggtatgtctgccgccaagacatcgaagggcacgctcgattctcaggatacggttctgttcaacagttcgttcgaagaacccccgaggggtggcgggcaagagtacgaacgcgccagactggcctgcgagatggccgagaatgaatgggaaggtcgcattgacggtgtgctgcgcatggaagctggctttgagattatcctctgcaactttgagcgcgatctaactacagtgcgaatcacgcaggtcaaggaagacactgaggaacaccgtggacttaggggtaaccgtgaacacggtgaccgggatggtcctcgcagagagggtgatgacaagcaccacgacggtcatggcggaaggaaggacgatgatggaaggcgacacggccccggtggccccggcggtccgaggggtcctggtggtcctggtggtcctggaggtcctggaggtcctccccacggcggacctggaaacgggcccgactcgtcgcgctggatgcgcgcaatcaccgcacgctacaacggaatcggtgggaatcgagtgtcgctgaacttcaaccacttcgtgacagccttctcctacgacgtagaactcttccaagacaattcaaccctgccccgacttgcctacctctctcccgaggagcgcgctgctatccgtgccgaagtcacaaatctggtcttgacgcatcgtcctgccgatgtctccgaagattggcaggcgattacggatatgatcgtgactcggtacggcgatgagctgtcttactttgcttccggctggattcactcaattgagcgcctgcagtccgagattgagcgtcttctgtcgccgttcattgactacagtgcgcgggatgatgtcgctgagattgagcgttgtgcaactcagttcttgccgccgttgtctttgaagagtggtagtatcgcggcgcatgctgtccatggtgttgctcaaagaatctgctcgtctctgattgaggctgggaaggagaaggagcttgactctgcggttcaggttcttcgggatctgatcggttatcttgattgggcgacgtggaaggagtgccggggttgtgcggcgaatgagatttgtgtggtgcctatttggcccatgggtacaatcgaggactatgatagtccaaagtgcaaggatgcatcaaatccatacgaccatcgtggagagagctactggggtggaatgcaccactgagtgacttaatgtggatcactagcctttgttttagttcgggttttcgaccctcttccagccagacttgagatttgctgtttggacataattggtttatttcaggcatatataacatttgttgagggtatatacagaatacagaacataataatgctcaagaagtatgtagagtatgtagaagggattgaccattttgttcgtcattgttgtatgtggcagttccaaagcaaatcacggagtgatattccctttacatataagaagtaaaattggcaaatggtagaaaagaaaatcagatcccatcaacgggagaatatttactggacgagaccacccttggcggaggagacgatggagccgacggtagtgccaacgctgccaaggccgagagtggagagaagtccctgaacagcgccgtcaaccttgatcaaaaggacggaaaccttatcctcggcgttgacagcaatgaagttagcaccagggatctcgggaaccttggacttaagctcagagacagagggagctacggcgacgacgttgccgatgggaccctcaatggtggacaagtcaagaccgctgaggagaccgacgacagtaggctcaacctggacaagaaggttcttgccaccagcaaggccgttcacgtcagtgatggagagaacgttttgtagagggtcgtcgcgcttgacgtttccagtgatagactcaaggccgccaacgatggagccgagaaggctgccgaccttgtggaggccgagactggagagcaggtcgacgacttcctgggtcagctcgatgagtgcagcgttgccattgtcgaggagggcggtaatctgggtgaggccggaaccggtgttcgtgtcgagcttgtcgacggactcagccgtttgaatgacctggcccactggcttctcgagagcgctcaagggcagcttgctcatcaagctctcgagctcggactcggccatcatttcgattttcgaggttccagcctggttgaggatggaaagaacctggccagcaccggtgggatcaggcaaggtggagaatgagggagttgcggcgacatcggagccagagggaatcatagatgtcatcggtagaggcatgcccgaagggatgacaccggagggcaggctagagggaactccggagggcaaagagccgatggtacccgaagggatgttggcgggtagggccatagccgcagaggccagaagggcgaaggcgaaagacttcatcttgtcgttcaatgagtggaataagttcaaagacttgtttggtacaaaggaatggacggtgtggaccgagattaaagaatgacttgttggtaaagaatgacaagaagaaagttcttagaattcaaacgtcccgacaagacgacccctgttatatacgatagctgtcagcatgggatcagcgttgatgcgagtccgacccctcgtctgttgacgtccttgagcgttctcctgagctaacaagtcttgaaaggggaccgctcatgtcggaaatgagaccgatgggagaatggagcagtattgttcctgtttcatcggccaagacgaaagtaagcttcacgctgagtggctaataaaggcgctaccacacaagattgggtccgacacatgttgctagctccactataagcttcgtatgaggtccatcctcattagccactttgcagatcgttcactcggtgcaggaacaaagcccgggagggttcccactctggctgtcaggatgaggccaagatattgatggaattttcgtctttatgggccaaatgcagatcatttgtgaatcgggaaaccccttggtcaaggtataaaaggaagcatccgcattctagggtaaatttgccgcatagtgagcttagccttcaaaatactccgcactctgtatcatcacagcaatgaagattccgagcccaaatccaccggcgcttgtgattgatcgagtcttgtgcagcgaaccctgaaaagtcaagccgggatcgacatgactagtacaaccgtgcagatcggaatcaccaatcatttgttggtatcctgcgcagggtaacttgagatcagcactctgtccgccagaaaagattgtaagaagaaggttaaacccaacgtaggcaacactaaggtagattgcaatctcattcctccatagtgggtcgaaatgtcaaatagcgcagtggggccgtgattcccgtcagctgcgttgagttctttgtttgcaccctgaaaaacggcaggattgctggtgatgatatcatcgtcgtgtcgggtagtggcaggggatcgacaggggttaccaaagtcgcgggctaacatggatgaaggtagatgttcacacgtactgcgaaggggcagagcggccaaaggtcttggaaccaggttggaacagcttattattagtaagagatggtttagagaaaaagtcccattgtcgtagtggcacgattcgttggtacacggggggagattacaaaatccggggaagcgggtctgtgggttcgcgagagaatcaatacaacttcatttgcttccttaaaaaagagaaaaaaaatggtggccttccccaattttgtgtcacaagtgataggcagatctactcgtctaaaccaaccgcttaacgggatatatacacatgcgttgttagcgaatctcgactcggtcctaccccaaacgaagggaccaggcgggccaacacctgttaggattcctttgttctttgagaactcgccctggctcgaacgcacgctctctcaagttctggcggtcaacggaaggtacagccttgggcctagagactgcaccaacggtcatattccactgagctaagtggggcttggggtgaaataactgcccgttctgttcatcataacagagccttttttaatcttcctagtgatttgattggctggatcttgttgttctcagttaggtaatcttgaagctattcaggtatctgaccttcacccgctctgccccctcacccctcgcatacgtactcctgagtccttactccgtagtgtcacagtatcaaccttccaaagttgtaaatctgaatattccataatgtgaaatgacatggatgtgatgacatggatgtatccagggaagatagtcaggggagaccgtcaaattaaactttgagagggtccgggatctcaggggtaaactcacacgtttggatcagcacccggacatttgttactttgatctgcttctcgaagccagggtcttacagaggaatgtatgtatgttgtggatgaatttggaaataattttatacaactctaccctgatatacatgtgccttgacgaccgtgcggattcccactcggcaatgaattactacttagcaggacaaaatcctagcggctgcggcttcagcaaccaccatgacagcagcttggatattaccggtcgggaggtcgggatggatactagcgtcgacaatgaactgaaaaaagggttagtatcatctttcgagcaacgtaacattctggacttacaaggttatccactccatagaccttggtattagtatcgacaacggaagtgccgcccttacggccatcatcggtacccatcttcgcagtgctggtgtagtggataccagcagtttgagaccccaagatggctgagacattggtgtaagtctcaagctcaaagccagtggatggggcggtgatgctgttgaccatcttctgaataaaagtacgggcggccttctggtcagcagcggtctggaggtagggcgacttcacaataacagtatttccgctggcatcaagtcccaggacaccggacgaggtgaggccgtgagtcatgtacgtggtgatggtgaccacgccttcactagtaggtgcgcacgagccctggtagtactgggtgtggccatcaatctcctccgaggtgaagaagatcatgcggtgcttgccctgggtcagtacaccgctgtgattgcggtagagggaaatatcgctagagtcggttccgttaaggacgccgtcgtagtcaacaaggccaaatgaggcgttggtgttgaagacgatcgagaaaatggggtggtccttcagaccgacaccaacaggcaggtcaatccactgggccttgggaggaacggtaactccgctcttcttcgcagtctcaatctgggcctggccaccaataccagagttccacaacagacgtggagtagacaaagcaccggaagccagcaccacgcgaccatgtggggcaatagtgatgatctcagagccgcccgaggcagtctgcacctcgacgccagtgacctgactaccggaacggaccaagcgaatgactttggtttggagagcaaggtggaagttatctagcttggtagcatcgggtagatatgtgcgaacagggccagcacgcatctggttcttcacgttccaggccgggtagctgtagacctggtgcttctcattcggctgggcgatcatatccaccgacttccaaccaagaccaccgaggaacttggacagcacaccataaagagcctggtcatatcgcttgccgtcggcagagggcaggatggttccagggttgcgtttgtagagtcggtctgcagccgactggacatccttccacttccagcccttgggccacttgtcgtcgaagtcgcgggctggtgggtgaacaaagaccatgtagttgactgttacaccaccgccgagcacacaggcagcagtgccagcagtgtcggtacacacatactggttccagacatcgagcgagccgatgtcagccgacagtcccgggagatcgatgggagtcaatgagtggtcccatgtcagggtctcattgtttccggtggccactgttggtccgacacctcgctcaaggagcagaactttctttcctgcctgggcgaacttctcggcgctgatgattccggaagggccaccaccgaccacaatatagtcataggtgtgattctggaagacggaagcggaggcagctgttgtaaaaacagagagagaaatggctagagagccagcttggaagatcctcattttgacgtgtacgagggaataagatctcactgaaatcccgatctataaatcttgtcgggggagttggccattttaactgttccacaacgagtccgtcacaccggtacagtcgaactcggtggatcaattgttgaagacttggcacgcgagcgaaacatggcgaaacgtggctcgtcgtgggtttaatttcgtcgaatgtcaccgattaggtatagtgcgatcagataagagaactaacttttcttgttcctgaaccagcccactgggtgaacatctggaattttctgggttcttgtctgataatcatagagaaaaaatagcacgcctttgaaactacactatacctttgttgtatgccaaattaggtatgttggccttgaagttgtagcgcttaaagtggcgccgttttaagaagtctcggaccgaacatgcatccacttcaatcattactttgattcagttctcggagtagacataccgaaagggtctgtgttccgctcattcttccgggatagggtttccccagccaagtctgccgctgacgtagagataatcaatctcgagctttagggtatatttttctgaactttgattagtgtatcctatggaagaggcgtcgagaaacagggtactcgatcgagttctctttctctctcagccaccgtcccacatataccttggcagttctattgtagatactgtatgtcacaaagttctagaacacttaccaagtggatagtggatatcatgagaattcctaacgtccttaccaagcatgcaataagcagaattgccgcgagacccacttcgattaatcatgcattatcaatttagggaagtagtaacaacctgagggttccatccaagcaagctcatactttctagtcggcatgtttttctcccgcgccgaaattctgctagacatgctgacccccacagaatggggcgaagctgtcagatatgccatgctgtactccatatatcgtagcagctctattctcgcctttccaggaacatccggttggctcggatcgtatcgcgatccagtgatggtagtatggtagtagtgccgacaataggccgaaccgtgaatttcttttgaaacacatccttcgtttcatatagtaaggggcgaagcttgcaatagtgtcccaagagaatatcggcatatggacagataatcggctactgctaataatgcaggcattaatgtaaaacttgaaaatatgagtggaaggccgcttataagctcgcgtgaccaattcctttgtcgtgaaaccaggattcgagatatatatctccgaagtttaccgtcatatgctcttggtgctatatttcgtgactaaagcattgctacccacgataaattccaacgagtacccgagtttgtgtctggctcaattcaattaacagagaactagttggagacataccctaaaggtgtagcatataacatgacgtcatatgctatgagcttgtggtttgagttgaacaagtccataatcagtctctgactatgactgtggccaaaagattcggtccaagtgctactgacagcaacaagcattaagatattgagggttttgtaaattcccacttgaatatgagacaagatggggaatatgagggtcaacaaaagagtggggctaaccgttgcggaagctcaacatctccaacatcccttgtaccaaccaaggcgagatcacgcttaagatcactctcctctaggaagaaaatggcgggatcagccggccgccttataccggcatcttcacgcactcttctcctcaccttcgacgcgttcggcaccctcttccacccacgtctccccgtccccgaacaatatgccgcgaccgcgcaccaattcggattatcgcgcactgccgtcaccccggacaaacttgaaaccgccttccgggataccttccgtgcacagtcacatcggtatccaaattatggtcgcgcggaagctctccgaggtcaatacggggggccgaggcagtggtgggaggaggtaatcagggggagtttcaagcgtgttttggctgcagagaatggagagacgcgccccggagacccagaagaacatatttctgatcgcatggtggaagccttactagatcgatttgctggttccgaggggtacgcgctctttgacgatgtgctacccttcttccgccgaatgcgcaaactaaaggctgcgcataagtggtcgtttgataggataattgtgggcgtgatatcgaactcggatgaccgagtgcccgctgtgctgaagtcgctggggctgacagttggtgatatgcgcgccgaccaggatcgatcgagtatggatcttcctgggtttgagggacgaagtatcaacaacgatgctgccgaggaacacgttaaagatcatgcagaccgcaacttggacctcgatatcgatatggtcattacgagttatgaggccggtcaatcgaaacctcatcgcttgatcttcgacgtggcgagacggcaggctctaaaggttgcccgcccatggttgaccagcagaaccaaatttagttctgtgcatgtgggggatgatttaaaaaaggatgctcaggctgccagggatgcaggctgggagagctacttgcttcttcgagatcatgttagttacaataaccttgactcgaaggaacttccagatctcctcaagtttgcagataaattggagctttttccataaaagcactggccacagcgagcagatgaacagttgaacttgatcaaagtcaatcatggatcatatcaaaccacaagtgaaggaaatacctacgaagttccttgagctctatggaacatcacttgccctaaactgatacaacgacaacatacgaaattcttgacagaccatgagtctgtgctcctcaccctcgggctttagcttgatgcttcgcttcctgaaacacaccacaccgcctttctctacattagagcttcctggcaccgacgacctggatgtttttgcttctccacaagcacccaaagcgcaatctcgaggccagcctcaaaaatcgtgctggtttcgggtttggttcattcgcatccacgacagggtctattctttcggacagcccacagcaccgaaattaattgaaaatggctgcccgaacggcttcactcgattggttgacgtcaatgtggttgtattgctctatttattactgcggaggggcataaagtaataggaagtaactatgtggtggatatctagatagaaaaattatatccaaagatattgtatattcagttagctattccatttctttgcgaggcttcatcctccattcaggacagagatcaacgactcttttatacaacgcgataccgaaaatggctagttcaggtctgtcatatacacaaccaatcaaaatctcgtacggagtacaccccgcatatccggtacggagaagacaccgaactgcgcttggatctccgtcctggttcgcgaattggtcctgcttcattacctcaatttatcaaagtcttgaaactcgacgcagaagtcccactctgctttgacattcaagatggaaggggttcaaaagccacaggggtctgttgtaatcatcggagctggtactcaaggtagacgtcttgcgcacatggtaagtgctgatgatcaataccataaacatctgcattggtattaaagtattgaagtggtcgagccgaggcggcaccgtccgtctggtagatccccaagagaaacagcttcaagatggtctgaagtacgtggaacaacttcgtgcggatgctaccaaccacgaagggaattgggggaagattgagacatcccagccctcttctttgcaatctacactaaaagtgcatggctcgttgttgaggtatgacttaactctttaccaatagcactcatttattgacatggcttgatagtgtgtgccggagaacttggaccttaagcgaaaagttatcactcaacttgatgagcttgcacctgaagatacaatcattgcttcgaactcgagtagctacggaatctttgagattatcgatggcatgagcttgaagaacaacaagagaattatgagcgcgcactgctgtaggtgactatatgctaaatggaatatttcgctaacacctagtgtcagattggccgccagagacatccggtaatgcctattccaaattatagccttttcttcaaattgctaacttgggagtcagcaattgaaatcatgggccacaaggatagcgatcctaagctgattgagctcgtcctggagcaatgtaaagaacatgggttctcgcctttctacgtcaaaaaagactctgtcggctacatatacaacaggtgagttattcttctccctctctattactacccgatcaggtttctaacaatcttccagaatctgggctgctatcaagcgagagactctgctcacattgtctgaaggtgttgccacacccaaagaaatcgatgccattttcaaagacgtcttgaagacgcccaagggcccatgtgaacagatggatgttgtcggcttggatgtggtgttggacatcgagaatcactacgccgagtctcggagcggaattcctacagagccgcgagactaccttcgggagatgattcaaggtggaagtctgggtgtcaaaaatggccggggattttacgactatgaagaacaaaagaagtgaatgtttctatagactaacattgatctattctgtcgtttgacatgaaatgccctcttataacttaatagtgaagtcccactataaccaacgaatcagctctcagatccgcctggtacctcagcatcattggtctagtggtagaattcgtcgttgccatcgacgaggcccgtgttcgattcacggatgatgcacatctttttttgctttttcttcgttatagagcaaaaagagaaaaatgtactccgtagattgctcccatttggaaaggtcgctagaaaaatatgcaatctaaatcgttgattgaatatgtagcggatctatcatgaacaaaacgcctaatgcccgaactccatgttaccctaaccccgggaaaccaatcccattccatcataacataacaaggcaaatccatgcccatgcagaaagaaagacatcaaattcatcatccactcagtcccattggcccttatccaacgcacccaaaccaccaccagtatgcttacccagcaacttggcaatgttggaccccccgctgcgctgcttgatacggagctccttttcacgctcacgctcacgggcagctgtgtacgagttgacggcaccgcccttcttaggacccgaagctgcaggtttggtgacacggttggaggtggtcgaactactagaagatgaagagcctgatgtaacacgacgtagaagttgaggagggcggaatccaatgggaccctctccgccgctgccgctgtggaatgcaagcttggagtttgtaggaccagagttggtggatgtggcggagttggacgatgcttgtcggaggagtgcaaggcggtcgaccacgactccgcgcgtgcggcgtgggtggctaggtttgatgaaggtattgtccgattgcggttgatcgtgatcaccttgggcttcttccgcgccgggagtttcatcatctccttgctcgtgttctgcctcatcaagtgaagcatcgtcctggaaggagtcgtattcgaaggtttcagtgaggaaggacaacgtttcgcggatctctgctattgtggctggtttctttgacattgcgctagcaggggtgcgacggaggcgaggcggcagacggttggttgcatcttcagcggatggctcgagagggcgcttgcgactctgaccatcgctcgtcgcatcattcgactgctctcctgaaacggggacctgcggagtttctgtttgggagccgttctcttcttcctcaaggaagtcgatattgaagtcatcatcaatttcgcgatcctcaacggccttgaagaatgcggccttcttggggttgtcggcaatctcgccgattttctcgtctgcaaggagagcgcggcgcatcttagcgaactcgcgctgcttctcacgacgacgtgctaggagctcatcatccgagtcatcaaggtcaaagtcgtcatccacatttttgcgacgacggagggctccagtggtgatgtctctcatcaatttggcgacatctttctcgtcgcggttgcggtcgtgaatcctgtaagaatgttagcatcttctcattgaaaatatatcaagtttgaacatacgcgttgagtgcggccagttgcttctcatcgaccacctcgccactgttgtcattgatcatttggcgatcaacggcattttcttcgccatcgctttcgtcactgtgacctccaaggcctgcatattcatcttcggattcttcggctgcctcatcgataatgtctttcgccttgctggttttcttgtcgtattgcataacatgattcttctttgcagccttatctttcttcatgacattgaaagcgttggcatcgatttcaaagtcaccttcgttattattctcgtcgacttgaacaagttcacttgcacgtcctcgccgcaacattttgcgcttgcgttcagcaatgggcgactgagtttggcccacaaggaccgtgtcgatggtagacatgggtggggtagccttgaatctctttgcaggatcgaatggtgagaatacaaagccctcgtcctgggttgggtcgggcagctgggattgagaatactctgagaaggcatatggtgcaggcgactccgatactcgggtcacactctgcgtgtagctctctataaagttattatcctgggtctgcggctggctgtctggaacaagaacttctgaatcctcctttcgaagttgaggaacaggctgaccagggtctgggagagagaaggggatggtggcagattcttcttgggtaccaacgccattaccatccaacgtggaggcaaatgcctgggtaagacctagggacatatcgcctagtgtgcccatgccaaggaagttgggtcgttcgacggattgcgggacaaaactcggggctctcacaggcgttgagggtgcttgtggttgatcatcatcttcgtcatcgctaactactagagttcgtcgcttccgtctcagggcaggcatctcgttctctgcatctgaaggagcgacctcactctcgtcgtcagccgaatcgtcgtcttcgtcggcctcctcttcgacgagatccccgccaccattgacgcgctcgttttcttcctcttggtcatcttcatcgtccgcttcaacatcaccctcctgatcagagccggaaagcacgtagtcatcatcctcttcttcatcgtcgtcaccattagccttcttcatggcagctttctccagtcggcgaatttcatctccctccttgcgcgctttctcaacaaggttttccatgtcatcctccatcgctgcacgctcctcggctgtttcaatgacaactcccttggccctgagctcatccagccgctcctggcgctccttggccgcttgctgtcgggcccgccataatagatttgcggaaagctctgcggagttcatggaagccatttttcgggtaggagatgccaggtgtgccaatgccttgagcttggtcatagaggggtcttcctgtgcctgtctagtaggcaggttttcgaacgctgcaatgccacggcacttgccaggggatgttatcacctcaagatcgctatcggaatcgtctacatcgttctggtgcgcagcaacctctttcctagaaagcaggacgcggataggtcgttgtgtcagtggtcggaaaactctcttcgattctgcaccatcggatttagattcgggtacagaggccgatacatcttgaactgaagggccctcgaacaattcaggatactgatttggcgccataaggacattcggatcaggcaaaccttcattgtccgtatccatatccatatccacatcttttgcttgagtttgggcatgcccagaattagcggtcgacttagtggaatccaaatgaccgagaactggagaagtatgcggagtgtctttcgttttgttgtgtagttctccgtcagaggaattttgtgatccgaccgctgacgatgaatttgccgcgagctgctcgaccgggggatcgggttgcatgaagttgaatttcgcgaagaggctctccttggtgatcttcttttttgtcttggcctggtgagctaattgcatgttacggctcattcgctgagtctcctgcttcatctcatccagtgccttcttgctggctttccgcggctgacgagccttctgggagagcttgctggcagaacgaggatcgtcagcaccgctctcctcgcctgacactatctgcgaactgaattgttccagctgaacttttcggatggccttcttagtttcggcatcggccttctcgcgctcctcacgttccttgcgcttttgggcaacaagagacaggaaacgggcgtttcctctaggcttcttctcttctgcattttctgtgtcttcgttttcggtgtgtaggtcgtcatgcggttcgcctggagaggatacaaagagaggagagtcggctcttgaacgagaaggggtttggctcgttctgttgtcgggcctgggggagttggttgtggatttgtgctttctcctcggaccggccgtaggtagatcatcatcactggattcgtcgatgggtgtaggttgtggttctgtctgctgtggcttctcgccctgttctttttctgatcgaaaggcctttgacacacgggcaaatgcagaatttccgtcctcggtttcagctgacctggaattaccctgtaaacgagcagccatacggccttttggtcgaaaaacctcatctgcgctagctgattcgtctgagtcgtgcaataggtcattctcgcgtgtattggcgtcccggactaaaccacgccctagatcaagcttcgagacagcatctgttgacttggcaatttgagtatcatcctccgaatcgctatcgaatgctgccatcatggccttgatcttctggccaggagtgataatggtcggcgaatcgcccgcgggcgacacggaacgcgtcgaccgtggtgtggatggcgaggacatggcgcgaatattatggtgaattacggtgtgttttaggaaataattcccatactgatatcaattgtacttggaggcaatctttaagacgtccaagattcagaatgaggtagagtggacgctaggttcaagggcgcatagtctgaacgcgaggcgcgttcctcgcgttgctaggtcatacacgtgaccttatcttacttatcgcctcatttctctcaagcggacgttaattgattattgttacaggcacgaagaggagtagtagatgatattttctcttttaatctatttttgtgagtttttattattttcgaattatctcttcctgtagataaatgctgcgctgctaacatcgaccggagtattgctcatgctgcaagcttgatgccattttctgaatagacgccgagaccacccacagactcctcaaaaatcgcgcaaggaaaaaataacaagcaaaagatacaatacaattcgggcaaggctttatgccagtcaccagaaagaaatgtacacttgttcggggaatcatggaatctcagaaccagagaatctttctcacacgtagtaaatcggttcaccaaacaacagtctgaaccgaagagcaggaaaagtcggcatttccgaatcagactagatctcgatgtcgatgtccatatccagcgctgcaatgttctcgtcgtcggtgttgcggtaagtaatcatgaagccattctttggcttctttgtagtgatgcgaggggcggaagctcccttttgcacggcttttgcgggggtatctttttggttttccacaggagcggcgtcggcagcagcgggtttgggtgttccgttgacatcgtggtgagttttcgccacggttcgcacgcgcatgaagggattcggggcagcctctccacgtgcaacagcctcggctgcctttctagcggcctttctttcctccagctgagcacggcgaacgttctcaatgttaagcttctggttgcgaaggttcatcaagtggactcgttcggcttccgatagaccactatcgacctctttcttgacaaggcttgttccccaggatagggtcggattgaccattttctgtagttctgcctcgattttctcggcctcctccatgtctccgttgaccttggcgaattccaggtttctttcgagttcaagccggttgagcacgttcttcttgtggtcgaaagcaccctggcgacggagtttctcgttcaactcctcccgagtgaaggtgtggttcaggaggcggttgatatcagcgaccttagactcaaccttaccctttgtagccagcttgcaatcctcaacagcgagagtctgaacgtaacggcggtactcggcctaattgactgttagttggcttccaagcttcgaggggaaggaacaaacctcagtaagtggagagttggaaaaagtgacaaatgggaagtctctgacagactttccatgtgccagcttgacatactgatccgtgacaaatgagcggccgttttcgccctccaaggcgtacggcttgccctgagagattcctagggaaatgtcagcgcgcacaaacgagcgaggcagcataagttcttaccagtaatcaggcccaggcgatactcattctggccggtctccgggtgcgggccaatgctcaaccgagcgtagcaaccaatcatagcagtctcaaatccagggtagaagcaaactttggcaaagttattacgtccaatttgagcgcgtcgaatttcgcgaagctcggcgggcgggtcatccttgggaatcgcagcagactggccaacgcggtcatccaattcaagatcactctcggcatcagcatcttcatccgaaatatcagaccccatggagcgcgaacggcggcgcgactttgtagggtctcggcgacgaagttcatcccgcttgcccttttgctcacgctggcgcttgtaggcctcgatggctccggacgtttctcctactttgcgaccaccaagagtggtcttctggcgcgagctcttgcgctggttgtcgtccaagccagcggaccctgcctttcgcttggctttcttggccgctcgtgcttcctcgcgcgagcgagatgctagaaggcgacgtagagccagatcttggttgtggcgatcgacttgctgggcacgttcggacagggtttcctcgcgctggatctcaggcatggccatgatgtccttcttatcctgggccgagtagtacaacttttcatatgggaaaatggggcgatccgcatcgttgtcatccgaattgtcggcctctgactcggactcggacatgggggcggactgaagcgagtgacgagatccatcgtcagacctaaatatatggtcaggttaatgagactcttggctatcaatatggaggggcactgctcacacttcaccctcggattcatccttgggcttgcgcgatcggcggcccactgatttagcagttcctttgcgacccatggctgcaggtgaggtacggtcttgggtgtgtgaagaagcagagtgcgctggtgatttggggggtggtgaagtttcctcctcagagtcacccgccaacgcgagcagctcggcatccaaatcgtctgccattgtgaatatcgaacgcagttataccctctcaacagaaatcaatcaatatgagacctataacaacaggcattcaacagcactatgacaataggagtattcgtactcctatagacttcttccctcctttccaggagtcgttccaaaattggagaagtaggcaagaggggcgaacggtggcccaaaatgcctgttctgaatgaaggaatgtcccaaatttgacagactctctgtataaggcacaaagggagtacagagtggaggatatcgtaaaaaagcacgcatcaacttcatgacgttcaatgccaagcccgataataggcgcgcggtagcgagaaggcggtctaagcgacgaacgcgcgacctccgagcttcgtccctcgaatcggcttcattagtagcctaatttaattcctcgatgttgtctttaccgattctgcgcaggagcgccttgtcgcattgccgatattctgcaccggcagccactccaatctttctcgatttcctcgtgccgtcaacacttaagcatggccaatgtcggcaggcgtcaactaccgccggcacccccggcggctccaaacctctatatgttcttagcaaagagcaacgggaattcatggacggcgctctgcgagtgaatcaagccggtgaactcgccgcgacgctgatctacaaggcgcaaacgcctcagatcgtccgctcatacccgcacctccgacccttgatgaaacacatgtacgaccaggaagcagggcacctgaagaccttcaaccacctcattgccaagcaccagatccgtccgaccgccatgtatcccgcatgggaggtagctgccacatttttgggttggtcaactgcggcattgggtcgcgaagctgcgatggcgtgcaccgaggccgtggagactgaaattggatcacactacaacgaccaagtaagagagattctatcttgggaggctgatgccgagaagcgaggggaggagctggatgaggaactcaaggaaatgctggccacattccggagaattcgcgacgaggaactagaacatctcgaccatgcggtggccaacgattcgaaggaagcgaagccctacgatccgctcgtcgatgtcattcggtttggatgcagggccgctatcaagatcagcgagaagatctgatctggtaattcggaacgcatgtgccggggttgccctgccatatatattttgccgtctaggaccatgtactataccgactacttctctcagtattgctagctatacttaacattgtacattctaattgccggttatgtccgatctaatctaatctatcactcgccgcagggtatcaataaataaccgccttcactaggctcatggtctctgacttttatccccagtgtgtgaccagcgccgctcactcagagtcaatgagctcttgccccaagtaatccatgaagttttgggtgaatctcacaacctgctggtagacctcctcgaatccattagcacccccatagtaaggatcattcaccacctcaccaccgccaatgcgctcgtgcagttttccacccttgccgaaatcgccaaacaatcgcacctcagcaaccttcgcatccgccccatatgtaccgatggcagcatccacgtgcgaccgcgtgctccttgaacttggcttgttgtctgtcttcctctgcagagtcgcaatgacggattcgcgcacatcctgcagctcgcggagattggacttgtccatagcgaggaggtagtcaaaggtgagaaagtcttcccttgtcacttttcgggcggcatgctcgtaatcgtgtattttatggcggcgcagcgtagacatggtgcgggagtcgggcggctcgaggctgtgataggcggctgtaccagcggagtcaatctcaccgatggaggggtgggcgccggccaggttacggaacactccttcggccatgggagaacgacctagacaggattagcatgtcgtaatagcggagaagaaccgagttgatgacgaacagatgtttcccaggcagacaaataacactttggcgggacgcgcattcgagtcggaagccatggtggggtagcagggatcacgaaggaatcttgattttaagattttcaagatatgcggagcaaggaaatatatgcagaagtaagaatcaaagcaggcgatagtatacaattttcatgagggtcgaatttgggtgcaaggcgggggacattgatagaccctggttggggtctccacccctgggagagccatggatatacaaccgttgtcttcattcgacgttgacttgcattgctacacatatgttgtacatcataaagcaggaacaagcaagaaatgagttgtagattggcagctgtctattttatttttattttttcttccaattaaaaaaagaaaagaagagtacatagcccactatgtcacctccaatgacctcagatctaaaaaaagaaatcgatggctgaggggggatgagccacaggtgacaagcccgtgtggctgagttccagtcagttggcccagtaacaccgtccaagtggagttcgtggagtttctcctcttcaacaacccgtggctcactggtttcagcacatccagggttcctgaattgcaatatcattagggcttttatttctgaatcggaagaatctgttcccccctcttgccccccgacatctctacggtgtatgcaggcctaatcagtgtacggtatctccacaaggcacaaggcagtgcggagccgcacagacacatctgattcgccccagatccaccatcgttgccggaatcaaaggcgtcgtaaacaacagtgcggccaagccggagttattccacattttttttcaaagctgttcttcttcaccctccgcgctgtcttgtgacaacccaaaatacatatacggagtaccatctccttatatcaattttcgcttgcgatctcccttctgaaacaacgccgagaacttgcatacgtcaattggactagtgattcctcccgctgacgcttaaatcccactcagcgctcctagcgcaatctccaacaaccctgttacgcacttggggcgggataatttcgctgaactcgattctaaggccccagcattatggcctacaatcgtgtggacgccggtcagtgcttctctagttttattggacctttcctcctccctctctcttttcagcttccccgcgcattctccatctttctgaactgccgactcagtgctggtcattgattcaatggtcccagtacgatttgcgcgatcaaatcattgctactcaagctcttattgagcaatcttctacgtcgcaaaactaacaatgccgccaacagacccgttcggagacgagcatacctcgcccatcttgcatccctcccatctcaccggatacagccatcgccctccttccccagggcaaccattggaacctggctaccagctctcggacaacccatatacatatgcgccccagtcgcatcttgtgatgccatccagtgatcgcttggccgaacaacctactgtgagtattatgagataagagcgaagattgctacgatgagtactgattatctatctaaaaagtactcggtcgaacatgttgatagctcttatggccatcatcccgcatacgacgcacaacgtccctaccctggtcacgagtattcgcttgaccctgaagcccatcacgacgcctactatacccaaccctacgagccgacacaaaccccacatgatgattatgatctaggccagtacccagagggaggacaaactccctttgaagctgaccagcccatcctgcaaacgggcgaaaacccctttgggccggacccatacaccgagttccacgatgaaccgcgcccgacgcccagcccagcgcctcttcgccgctggaagacggtgaaagaagtccaacttttcaacggcaacctcgtccttgattgccccattgcgccgcgactgctcagccagataccccacgcagaggccccaggtcgcgatgaatttacgcacatgcgatattcggcagcgacatgcgatcctgctgatttcttcgaagagcggtttaccctccgtcagaagcttttcgcaaagcctcgcaacaccgaactgttcattgccgtgaccatgtacaacgaagatgacttcctcttcgcgcgcacaatgtctggtgtgtttaagaatattgatcacatgtgttcgcgcacaagcagcaaaacgtggggcaaggattcgtggaagaagattgtagtctgtatcattagcgacggtcgtgccaagatcaacccccggacgcgcgctgtgctggcagctctgggtgtgtaccaggatggaattgcgaagcaacaagtcaacggaaaggacgtgactgcgcatatttacgagtacaccactcaagttgggttggaggtaaagggcactcaagtgcatctcaagcctcgatccggcccgcctgtgcagctgattttttgcttgaaggaaaaaaatcagaagaaaatcaattctcatagatggttcttccaagctttcggccgtgtcttggatcccaacatctgtgtccttttggatgcaggtaccaagcctggcaaagactcgatctatcacctctggaaggctttcgatgtcgagcccatgtgcggtggtgcatgtggtgagatcaaggttatgctgtcccacggcaagaaattgctgaacccgctggtggctggccagaacttcgagtacaagcttagcaacattctcgataaaccgcttgagtcttcattcggtttcattactgtgctacctggtgcgttctccgcctaccggtttgtcgcactccaaaacgacaagaacgggcaaggtccactagagcgatacttcctaggcgaaaagatgcacggtgccaatgccggtatcttcacagccaacatgtacttggctgaggatcgaatcctgtgcttcgagattgtctccaagcggaagtgccgatggcttcttcagtacgtcaagtcgtcgactggtgaaaccgacgtgcctgatcagatggccgagttcattcttcagcgtcgtcgttggctgaatggcagtttcttcgctgcagtttacgccattacccacttctaccagatcttccgtagtgatcacagcttcattcgcaagtttatgctgatgattgaattcgtctatcagacgattgcgatgattttcgcgtggttcggaattgtacgaatctctcccatcatttttttgatatatgctaacgccttgcgcagggtaacttcttcttggtcttccacatcttgaccacatatttgggctcagatgatctactgggtactgctggtaaagttctcggcattatctttgagtggctatacctggcaactctcgttacgtgcttcgttctagctctcggtaatcgacccggcggatcaaacaagttctacatgaccatggtatacttctggattgtgatcatgatataccttgcattcgctgcggtattcgtcacggtcaaatcaatccaaacagaggtcgaatcgaacacctttacagtcagccaactgttcaccaataagacgttcttttccatcatcgtctcccttggatcgacctatgtcatgtggttcctcgcctcgttcatcttcctggacccatggcacatgttcactagtgtaagtgactatatgaatttaatcttgtacaatcttctaacatcctccagttcattcaatacatcttgctcacgccaacctacatcaatgtcctcaacatctacgccttctgcaacacccacgatatcacatggggtactaagggagatgacaaggccgagaaactgccctccgcgcacctcaagcccggcggtaaggtcgacgtcaacattccacaggacgacggcgatctgaacgaccagtatgatgcggagcttgccaagttctccatgaagccccccaaggagatcacagttatttccgaggaagaaaagcaagccgactactacaagggattccgcagtgccgtcgtgctcgcctgggtattctgcaactttgctcttggtgccgttgttctgagcgctgccggtttggaaaccttcgacgacacatccactaccagttccgatgatgcgcagaccgaacgctccatgatttacatggaagttgttctctggagtgttgctggtctttcgatgttcaagtttatgggtgcaatgtggtatctggttgttcgtatggtgagttgtcttcctcgcaaggtttttttttttttcattacgtactaacattatattctagttccgtggcgtttgattcagcgagctcttaaacatgatgattgtgttcctttgcgccaatgctatgttttcatatatcccctgattttatccggatttggtcttggttacaataccacggcgggcccggtctggtacgcaaatgaaaatggaaatggaaatctaatatgtttgatgacttcccagcgatgtgtttttcgtcctttgtgacacgcggaatggctgttttggttttttctttacatctcgacttggtgcatcttttgcatgtgcttgcccttgcatatgtatccttgggctcatgcttttgcttttattttatggagtggaatttgtgtactctatctgtcgatatggaggagaatattatttccgccaattctgtgttcattgcaaagaaactgtatttttgtaggtcaacccgaagcatcacatgaactacgcaataaaagtcagggtttagttttgcgaggtttcaattattgaatatagtgatatccttccattaactatgaacttcactatgaggtactaaaaaagcatcgtccaacaagtgtctagtgcaccaagtaaattagcaccaactccgtaacccgaatcgaacatgatttcaagaagcctgattcttagaatgcacacataatgcaatccctccaagtaccagccccatccccaaccaagtctccttcgcaatcaccttgcggtcaacataccactccccaagaaccgtaaacaagaacgcactcgagtttgccagcggcacagtcaaagaaagttctacacagcaatacattagcaattccgcaccccaaacggcaacactagaacctgagagcaaagaaagccaatagcactcaccatgtttcccaacaagcaaaaaaaaccaaatactgcccgtgaggttgataaccaagggaatcgcatatgcaggtgtacggagcagattaacaaccgtccagaaaacagaaacaatcttcgcccgcagccacgactgcttcaccggacctccatgtctccacgccggcatgggcacatcgtcctcgtcctcgtctgcgccgccttccctgtcttccctatcacggctcccgctctgttcagcaagtccagtatcctgacccgcggtcttcggtttccggttcacgtcactgctcgtactccgtcttggcacatcggcaccggagtcgctgtcttcttcttcccgagagagcaattcctgtgcctcgcccgcgtctgtgaacccggctcgtgccgagtcttgtgagcgtcttcttctgcgcgctgaggtgtttgggtcatttgcttgcttcgcttgccgggcgttgaagtctgctgctgcgcgccggataaagggggttgtgaagccccatgcgacgccgacgaggaggaaggagagcacgtagttgaagacagagggggcgggttcgatggggattccgggatctggatccatgttggtgttttgggacctcgaagggtgtgtaacgattggttggtttgttgcgcggtgttactgcggccttgacgttgatgcagacgtggaccgttggtctgtgcgttactgataagacggataaggtttctagtgacgatccttggatctataaaatggatccaacggttggaatgctttattttaaccacagtagattgatatagtattgaagagactgagtaaaatgataagatattagactggttcgcctgttagggtttcacaccgtggaggcttcaatcacgtctgaacgaatcgacgaattgaccagtcaattgccaacaacccacaacccacagccaacagccaacagtcaacggacaacggacaacggacaatatataacaaccaacagccagcaaccagcaaccagcaaccagcaattagcagccagcggccagcggccaacagccaacagccaacagacaacggccaacagccaacagacaacagacaacagacaacagccaacagccaataaataacccacagcccacacccacaagctcacaaggatactgcacaagataagcatcaagtgcagaatttgctctcagtaggtcaattgcgagcctccgatcaagcttgcccggccgtcacagagggtgtcgccacgtccgatggatgtgcatcatcaagaccgattcatcacagagcaaagtgcccaccaccctccttctcccccgaacccacttccaccagagtccacagcaccagaagagcagatctcctatgtccgttgcttaggcgaacgccgaggcttgagaagacgaacgccccactgtgtccgagaaacgagtcctggtgtgcttcatatctctgacgcgctcaaacggtcgcccgtgcagcgtccccctatctctcaccagcagctcatcctcctctttatgtgtcctcactggcatcttgaaccgtggcagtccctgccaaaccccaccgttctctcaccagcagcccatcctcctctttatgtgtcctcactggcatcttgaaccgtggcagcccctgccaaaccccatgtgtcctcactggcatcttgaaccgtggcagtccctgccaaaccccaccgttctctcaccagcagcccatcctcctctttatgtgtcctcactggcatcttgaaccgtggcagtccctgccaaaccccaccgttctctcaccagcagcccatcctcctctttatgtgtcctcactggcatcttgaaccgtggcagcccgctgcccatcccccttcagtgccgctcgtcacaggtgagtctgctgtcgaatgcccccgccagttgtcctccaccgtcgtcccccactgtcgtccccgtcgtgtccccatcgttccaggtgagtctggtgttgaagtgttagtgtcctagtgttagtgttgttagtgtgaagtaccattgtcattgtcaagtgttagtgtggaagggttagtgtagacgggtaagtgtaggagggtaagggaggaagtgttagtagggtgttagtatggaagtcctaatatggaagtgtcagtatcaaagtcaagtgccaagtgtcaagtgtcctacctggtgtcgaagtgtcgtggtgtggcggtgtgcggtgtcgcaagcaaagaaaggtgaagtggaagagaaagaaagagagaagaaggaaattggggggtagggggtatttatagcttgtgggaaacagcacaacctctgaaatgggaaggcacgtaaagacctactggcacgtgaaataggcaggtgcatgtcaataccctgtcattgttacctcaatcctattcaagaacaatggatatcatggtttttatatgtcctacttgcttgcccgggactctagatattcacgagatagtcaatgtattgtcttagctacagtctatagaccttgaggatgtcccgatctgaagggcccatccttcctgctgggtcgttccttccctttctgccgaagagctaagcgagttgatcaagagtttgcatgatttgcagggaggcacaccgtaaagcccttcaccctacaccctacaccctatacgcacagatcctcgtccatatttctttttgctctcttgtacttaattttttgattgaaatgactgcactctttggttttaataagtggctcgtcgtaggagacatcgaatatcaaggcacggtctgtggtagattgcacatgtcacgctattcatatctaggaattatacgctacgggagtcacccaagtaaccagtaagatgtgtagtatctattagcacgtcctgtgtgagctttcgtctttaattctctcagagatatatccagttgcaccatatagtccgcgatgaagaaccaatgctaatgagaagctcattatccacttgacagattgggaggtcggcctactgtggagatgtgagcatggctcctgagaatggcttatggtactttgcagtatgaagaagcttaattttacggttgcaattggtacttgagtagaattaatttgacacgaacgggtatcatgaagtgatatatatgccaagacatatatatgtagtgtattaggacaatgtctctatgcaacgcagtgtaaaagactcgatataaccaaatgtaacatagatatacagcaacatcagtagctggcccaaaaaaaaaaacattagaaggaaagacaaaaacaccgaaaaatgggaaatattagcatggaggcagtgacacaattacttggcactcttcgatttcttcccaggaatgaatttcatcatcgaggccttcagatccgcactgttccaccgcttcacgcggacaagatagtacatgagggtagccacgaaggtgttgaaaagaatgaaagcccacataataccgaagttgcgccaccgatcaccgtagtagataccggccgtttccatgaactgatccgcaactttgagagagcagtagccgcactcactcgtggcgtcgggattagttatctgtccaccagcggcggcggcatacttcatgaggtactgcccgcaagtatagccagagggaggattgaagatggctagttcggcggtcgagcacaccacctgacgattgtgaagctgtgtgcttgccatgccgccgatccaatatgtgaatggcgagacacggtacatgaagatccagaacccgggaagagcatcggggggctgcatcacaccacagaaggtgagagacatcgcgaagagaagaacgactactgcactggcggtggtttcatctgggagaccagcaatgaccatgtgggtgaaggtgctggcgtagatgaagaaaataatgcagaacaggaggacggttccctgggtcagcgaatcggggattccaacgacggcatagaagtaggagccataggtcaatatacccatgatgaccatgtagggcagctccacaaccatgttggcaatgaggaaagctttccaggagtaggatttgctgggacgttcacgtccctcgtagagcgatcgctggctgacgaagacgggcatgatctggtgagattagtgcatgttcactcgcttgattctagatttggcttacctgttgcgccaatgacgagaagattgtacaaatcatgaacagggagtagacgacagtctgcatgccttgcagcgatgttttggcaccatagaaagagaaaccaatgaatagaccagagacaattccaagcccccatttcgccagaatgtaggctggcatgcgccagtattgttggaacacgcggtatgtgacttcgttaatctggaaccagaacggcatggcgaattcagagtgattttgtgctgaatcatcagtggcggggggttcattttccttttctttgtgaattcgattgatctcattctggacctccgtgctttcgttgctctgcttccacacgtcgaaccagtccatgcccttgtcattctgaccagcgttgacaatgcccagcatatattcagctgggttctcgttatccgcacacttccgcgcaccgttggattcgaagtactcgagcattgtgctagagttatctccaaccggaccgaagtacacggtcttaccgcctcgggcgaggaacagtagctgatcgaattgttggaagagcatggcgctgggttgatggattgtgcaaagaactgcttggccgtgcgaagcaaggtcacgaaggaatgaacaaatagcccaagaactctgagagtcgagaccactgagcaatagttagcatcggtaaggaatgaatttgttgtatagggtacttgcctagtaggctcatccaaaaagagtagtagcttgggtttggcggccaattcaacaccgatagtcaacagcttgcgctgctcgacgtttagaccctcaccaggaacaccgacaatggcttcagcaaactcctccatcttcaacatgctgatcacatcttcgacataggcatacttctctttaaccgaaacggaggctggctgacgtaacattgcactgaatcgcagagactcacgcacagtagcagtatcgaggtgaagatcctgctgttggacataacctgtctttcgctggaaactctgatccagtggacgaccattgacaaacatatcaccagtaataacacccatcgatgtacggtgtgccaatacatcaagcaaagtcgtcttaccagcgccactgacacccataagtgctgtcagggttccaggtttaacccatccagaaacattgtctaaaagacgacgcggctcgcccttaatctcgatatcatagcacacattgcgccaagtgaaggtatctgtctgagcctggatagcacccattcctttttccccagtacccgcagcagcgtggtctttagttgtctcggtgctttcaacatcagatccagacttatggtcctggcgtaaactggcaggctcgtgaccgcgacggaagacgagagcttcggcggcacttgtagtagcagagttcagctcggtcgcgataaagtagatggccatgaaagcgatcaggaagcctatcaggataccaaagtttcgccagacgtgggcgtagctgtagttgtagttcagtgccatgaaccggtcaccgttgactgttgtggcgcctgccagcgaaccaggtgcagtgcaactgaatgcttctcctgataggtcggcataggagggaacgaagcttgagcaagggaactcgcgagcatggaactcgttggcaaccagaatctcgaaggcgtagaagatcggattgagataatgaatccaattgaaccatggatgcatagacggaatagggaggacaaaaccggtgtaaaccacgagaatcaaaatcatgacacctgcaagacccattgcctgtgaaatagtcttggtgacagcggccagtgtgcggaagattgcactcatgacgaacgtgatgatgaaagtgatgaggaaatagaggaagaagttggaaggttctcgttgcagaccagctagaaagtataggatgatgttgaacacgacagataagacaaacttgactgggatatcactaatcacaccagcaatagcttctgtgaagggatgataaaaggcaaaggaggcatgtttttcgacgattgggcgttgtgaataaagattgttgatttcggacattgcggtgagggcattgagcaggacggcgaagaatagagttgcacatttcgacgtaaagcccacagttgcattcggggtatcgtagaagacagatccaatgatcaaagccatgataatattagtgaccaccacagatatggtggaggcagcatcgttccagagtcgttggtaggcgcgaacggtgttgagtctgatttgcatataaacgctgatgatgtatggagacttgggtcgagtatgtttggcctggacgccacgcttccaattctgtaaatcagctagggcttgcacatcatctccaacaggattttgtccttcatattcagcaatttcatttagcaattgcttgtattcaggtgacttcagccatgcagcctcaaagtccgcaggagtacggggaacacgattttccatgccaggcttggctctccgctcctggggattcgagatcgaagtgaggaaatctccagtggtctgccgcgtcgggcaatcccagccctggttctcaaagtaagacttggctgcggacgcagctccgaagaatacttggtggccttcgtaaagtacaatcaccttgtcaaatacatcgtagatgctttgactggcttggtaagcagcgactgcttgacacgcgccagtgatatcagaggatagtcgcaaagcctcgacaaacttcaacgcggtggcggaatccaatcctcgagtggagttgtcccaggcagcgattggagcatgggctagggccatctctgcaatactgacacgctttcgctcaccaccggaaacaccacggatgaaatcgtctccgacgcgcgtgttgtatgtgtgactcaatccaaagacagccatgatgatctgggccatatatttggcaaattctgcgcgcgacatgccttggaaccgatgggcgggagttcgtgttgcagctgcaaactccaaagtctgaccgacggtcaagtgagggaagtgtctgtcaacctatagaattcaagattagcgatattctcattggcgtggtatgttgcgactgtacctcttggttgtatactagttcgcccttgaactctttcatcatgcgagtttgaggaattcctaatgactgttagctttaactaaaggatgcgggacctcaattcttaccattgtaatgaatgacactctccttgtccatcttcaaaccatgcagctctccagtcatggacttcagtagcgtactacagccggcacctggccgaccaagcacaagcagcatctcgccactttttaaaatgccattgaagtccttgaggattcgcctttgaggagagtgtgattcacgaatgatttggggcaaccgaaagggggcggtcagggtcgatgtaactgtatcttggaactgcagcgcagcgcccgatccgtatatgttgaggtttttgaaaacgacgtctgatgtgtgtcccgctgggccatcccggttgaggtctttgaaagccgcttttagccatttttgcaagtcgaactttccagattgggggtcgagagctggatcttgttcggcgagggcttctaggttatccgaggttccaggggccggttgccggtgtgaatgttcagtggctattctcgtgagggtgtcaacatcgttttggttgatgtatgtcatggactggactctcccgagagtcgatccggtatggggtggttgttcatccttttccctcagctcgaaggagtctttctcggacgtcatcgtgccgagatagaataaggaacgagcacagggaggcttaaagagaaattaattataatgagaaatcacacaaatgcgggcgcgatcagatatttaaagcctaggcactacgtttccgtttttggatgacatcttccattgtaatgagaactgtgggtcggagtcggaggtcggagcaattgaagacaatggaagagatataagtggagttgtgccctgttacgatattacgatcccaggacaatgattcggcacgggatacgaacagatcgacatcgaatcgggctcgccaagttgcgccaagtttgccgtaagggacctagtcgcgataactgcatccttaactgcccgctagaacctaaaggttttctaagcattctgctgagtcagcggcacttttttcgaccccgggacccggaacacggagataggcgatcccgagcctcggctcccgagcttatgcgaagccgtggacggtacgcgctgtacataaatccaattatgatttgccagacgcagtagagcttgcgagtgcatatctaaaatctttgcgccccacatttttttccagtatccctttattgattattattacagaccatacctatctaagactcggaggaaaattcggtcaaattgggcctgcatcggctcgggaacacatcggcacccattgatctttgaaccctgagacccgttaagccgggactaggcaccttacaacatatacactacgtatacgagcacggatgtggtactgtacaaagcacctggatgtggcgactcttgtgcgtttggtggcttcattgttggcttgcaagattgcttgtcgccactttttgatccgtacctggtggagcgcagattaccccagtatgcatatatgtaaggctcctctacggagtaaacaatgtactgttttcgatagactatattgatctcgccgtgacactatctatatgttgtagtgaatagtaccgaattaatgaagaatggcactcgggggacccgtggactaaccatgtctcgcggaatcatgatgcgattatgcatacaacgtacgatcacatgctatcacatgctacaggttgtcttttgctgtttgcgcggtttgacaaagtggggctgggcttgctcgtgcctcccggaggttccagggttaccgttatctccgttatctccccatactattttgaattgaccgcactcttcagtattcaaagaactggcttataacaattaatataaaagtcaagcgatcaattcgaaaagccagctccatagcaagagctaagtgcaggatctaattgcaaggcttacctcgccggaatcaacaacacggctggaaagtcgtggataaaggggttatttacatctacatggttggtaaaccaaaaggagcaaataatggatttaaaatagtgttcattgttcatgcaaaatcattacttccccgtcgcctccgcgggtattgaactcgagtgagaacgcaagctgaaagcagaccacagccagtgagaaaccaattaccgaagatcttgttgggattcgggatcgatgtctccagaaaagatggagttgacagatggcttgtaggcgtggagatagttggagttgcaagccaagacgtcttaacaatatccgaagcaagcgtcgatatcgtgattcgagaggctgtgtatcggggagtaaatgtctgacctggagtctaaactgcttggtgtgactctattggtcgcttgatgccattgaggtcgaccatggtggcaaggcatgtgccagtgatggttctgcaaaaaggcttggctccagtagagcgactgaaagaagacaatatgaggatgaggatggggataaaggatggggatggggatggaggtggaggtgggaatataatgaatttgtccgtgacagctgaagaaagccgttgtcgtccgagtcgctttgcgaagccacgcccggttgttggtttgccccgaggcaacttacggtgagtagcatttaaactaccggccggagtgctttcaccataagcttgtcgactgagtcgctttgcgaggccacgcccagttgctggagacttgcagtgggtagcatttaaactaccggccggagtgcttccactgcaagtctgtcgaccagaacggttcctggctgctgggttgttgtgaggcgacgaggggagggggatagggatgaggtggggtggggcatatggagtggggtttgggggagagggaggagatttgctagaaacgagttagcgagttcaaacatataagaccaaagaatgaatgcatattaccatgaacagttgtagtagaaggttgctggggccaagagggaagatcacgatggaaggttcttaggatgaaaggtcattgtcttgatgaaggttgttgtcttcgaagaaggatgttgtcatgatggaaagttgtcataatggaagtgtccaaggttgacatgttagatggtagtcaaggtcataatgagttgacatggtggatggttgacaaggccgtagtggaagattgtcaccatacagggttgtcaaggccataacatatggttgacatggttgaaggtggtatggcctgaggttgacatggttatagtggatggtatatgaaggccattgaaagtggaggtgccaaacccgagagatgcgaaggaggaaagaaagagaaagagaaattggggggaagagggggtatttatacccttccagtggcttaaggtcatgagaaactggggtgggtgacgatttttgaccagaagggaaggaactagggcaaacctgcaaaccatctggtcgcaccttccaatatttatccgacatgtgacagtcgaagctgcactcgcgctgtctatcagtggacgaatctacaaatcctaggccaattagcaaaaactactagtctatacatcagaggtatcaactttgcctatctatatacactccaagaccggcgtgactgttatggagtgagttattgaggctttgatattttagaccttgccatgaggcagtaaatcaatggagacagtatattatgtactcttcgccatatgtttcatgagcaatttctttttcaattcgcaagttacatatatagtcgaggcttcgaaggctactcggacagtgcttctattgccacatagtatacattattgtaatttgtttgtctgcagtacctaatatgtactatcaagagatatatgtagagaatacagacagattcagcactctaagccgttgctatattcataaaaagcgcgtataattgttttgggatgatttcggacacctggggatgctgagtgtaaataatgcagaatcttagctaagcaatcatatatccatccatggaacctagatcggtacctaaatcaagtgacaggccaaatggaaacaggattctaatcgagaccgatgtcagcggggcagatcggcgggctccgatgggaataaaacaaacttggaagccctcctcccctctttttctcttcatgagcccagaaatatcatctcaccatggcaatccaatcactacgtgaaatcaacgcttacaatctgcgcaccttcaagcaccactatgtctccgagatctcaggctcgctcggcgatctaggcacattcctgcctatcgcgcttgcgctagctgtcaacggcactgtctccctcgccagtacattgatcttctccggaattttcaatattctaactggtctgttctttggtattccactgccagtccagccgatgaaggcaatcgccgcagtggctatcgcgcgcagtttctcaaatggcacgatcgctgcagcggggatcttcgtcggcggctgtatccttgtcttcagcttgacgggtatcttgcactggttcgccagtgtgattcctattccggttatcaaaggtatccaagtcggggcgggattatccttgatcatcgcagcctgcagcagcatgctgcacccattgggctggaccagcccctcctgggccgataaccgtatctgggcaatcgctgcatttgttgcgcttctgctcaccaatgtttatcgccgagtaccctatgcaattgccgtgttggtgctaggtctggtgtttgccattattcggactacagtcgctggacatatgcccgctttcgaagtgtggcatcctttcgctctggttccgaccccacatcaatggcgcgtcggtgctgtggacgctggtattggtcaaattcctcttaccaccctgaattctattgtggcggttgttcacttggcgagtgatctactgccggatgtccgcactccgtccatcaccaacgtcgggttgagcgtagccggcatgaacttgattggctgctggttcggtgctatgcccgtctgtcatggttccggtggtcttgccgcgcagtatcggttcggagctcgctcgggagcaagtgtgattttcctcggcctgttgaaacttatgattggccttcttttcggagagaccttggttgacctcctgaagcgatttcccgctgccttccttggtgtaatggtcattgcagccggtacagagctgcttggcgtcggcgagagcctcaacaccacgggtgctcgggacctcaaccagaccggtggtggccttgtgtcgaacattgaacagcatattggtcccatgcttacagatgaagaacgcagtcgtcgctggactgtcatgatggtcactgtgggattactggtaggattcaaaaatgatgcgattggcttcattgctggtatgctttgccactggtcctacgacatcccgaaatggtgggagcaggcgcgtagccgctggtcggagggacgtctacgtctacgtgactagaaataggtgtggaatttcggggtttgaaatctcatgatattcttcacaatatatacgtaaagaattcacagatatgcattttgatcttttttatatatagcaaaaacaagcgcaattactcaccataagcaaatgcaggtcttcaccaacacactcaccaacacactcaccaatacactcaccaatacactcacctatagtacatccctaacatccacatcacttcctctctgtagcctggtacctgtactaggattctcataagggcggtcctccctcgccgcagacgaaaagccatccgaagcaaaattcacatcccgtccaaaccggcgaccctccctatggcgccgagtaacgccccctatatcatactcggagtcattataattgcccgtcacggggtcataaaccctagaccccaatggcgaagaaaccaaactaaacgaatcgtcctcgccgtccccatccaagagctgagccgccgcacccctaatatcagccatgacattgggcgcggaatctggggtcggggtatctttggaatctgaaacgtcatcctctagttccgtgatgcgccgtattcctcctgcagagctaccgccaggctcgggtaaagctagctgttcctggcctgtattgtcgtatcgtcgttcttcgacgacggccggttggcctagatcttgctgggctgtacgcacgactgttgagccgtcgggttcggtgtatgaagttgtcgaatacctgtgtccggttgtagtcctgccgtcggtgccgttggttgtggaactgtagtagtacgtggagcttatgaaggagtcggacatcgtagcggtgatatgtggaaaagtaaaagattgatctggtccacttgggatgatttgcggtttttgagttttgtttagttgggtaaatggagaatatagaatactaaacctttggggaggttgttttatttctttgcttgtagaagcgtctccgtaagatgtcgatatatgcaatgtacaagttgtactggttgctttcgaagttcaaaatgttgaatatcgatgcgtttatatatttcatcttcccctgtcctgtggcaagctttacttgccgcttgcatcattgcctcgtgcggcaaccaacctctatggaagaggcaaagacccatccgcgtcgccgaggggtctggaggtaccccacgagaatagagccggggaaacaaagcatatattgaacgtctaggcgttgtccatagatgcgcgtgcatggatgaggtcccagataaggtactgggcgtatcaaaacggcttatcatctcccccgcttttcaacatcgaaaccaactcatctccaactctggaacaaaaagcacttcatggctggacttaccgaaactcaggtcgcctccttcaaggagaacgggtacctcgtcctccccaactacctcgccccaaccgaagtcaccgctctcctcgccgagacaaacaaactccttgaggaattcccactagaatcccaccccctcacccagttcacaacgggcgacgaaaccgccgaccatgtcggcgacgactacttcctaaactcgggcgacaaaatccgcttctttttcgagcccgacgcgttcagcaccgagccggatccagtgaccggtcgcgccgcgctcctgaagcccaaaaaccgcgccgtcaacaagatcggtcactcgctgcataccctatcgcctcctttcaaggccatctcgctcaacgagcggaacgctgctgtcgcgcggtccctgggattcgtcgatccacgcgtgctgcagagtatggttatctgcaagcagccctcgattggtggggccgtgccatcccatcgcgattcggagtttttgtatacggatccaccctctgctgtgggttggtggtatgcgctgcaggatgcgggaccggcgaatgggacgttgggtatgtacaaggggtcgcatacgggaaggaagggtggtcatattgctaggaggtttgtgaggagggagaatggggcggggacggagtttattgagaatcgggggcctgcgctccccaaaggcatggaggaggagaagagtgaggaggctacagatgaggatttggagattcttgatatcaaggctggatcgcttgtgctcattcatgggaatgttttgcataagagtgagaagaataccagcctcaatagtcggtatgcttataccttccatgttattgagggtgccgatgggtgggagtatgatgtgcgaaattggttgcagccgcctgctggtgggttctcaaagttgaatgcttgatacacagttagaatacgaatgaatgatgttacggtcaataatggtaaatagttcgacttttattctttatgcaaatcctgtacaaaagatggcccgccatatacaccagtgtgcgaatcccagacaccccgaactccaagttgcgattcaaggctgtcagatcaggtcgccttcaacatgtcaagcattccctttgtttgccacgcttgttgggccatctccacttcgtcacgcacccggcggtgcagacgctccaccatcttgtcgacctgtaccgactggcccaggtttccggagtagatatcgagaaggttcatggcgacctcgacgctaagatcgaccaggcggggttcacggatgttcttgtaaacccactgcagcacaggctggagggtgacttcatcgcggtccttcagcgaggcacggagggcggagcggtggcgcagggccgtaagcagtgtgagttgcgaagtcttgtcagccgagctgaggacctggtccaacgcaacagagtagcgtgccttacggagatcgttctcccaaggctgttctctcttacgcttcttgcggtcctggccctcaatgacaatctccacaccttctccgatgaaatcgcgtccacgtagacgcttttcccatccagagccacgggtcttcttcttcttagcgacttcccggtcgtgctcctccaatttgccctccagcagagctgccatttccttccggcgttctcgctccttgatcttctgttggccagatagtcgggtcttgatagacagaagacctgactgcataccaacagcaatgtgcttatcctcgtattctgttccggaagtgatcgcgcggagagagagaatgggtgatgggtatttggatccggagacggggttccacccagtggtctcaaagaccttcatgtgtccatcgagggcaccactgagcaatcgctcaccattagaggccagcgcaagggcagtgacagtcttttgatggctctggatcatgtgcagcggcttaccagccacaatatccagcaccgcaatcttgttatcggccgcagccaaaactgtagttccggcgggcataggcagaatagtctcaatcggcgcacccatcttgaacgtcatagcggcacggtttccaactcgaggatcccacagtcgaacagtccgatcgtaagaacctgaaaccaccagaccagaagaagccatagagccaggcatgaatgcaccgctgcgcacgtaatcggtgtggccgacaaaggtgcgcgcactggtttgcgacggcaagtcccacaaccgcactgtacggtcatcactggctgtgaggaccgctgtagggtcgctaggagagaacttggtcacccacacaggcagcttgtgatccttccacgtcttgaggatggcgcgcgatttgacatcgaaaacttgcacggaaccggtgtcgtcacctgcaaccaagacacgtccatcgggacgaacgtcagtaccgcgcacggtgtcgtcaaaccgtgtaagtgtccgcaggagtttccgtgtgcgaattgaatagatctggactcgtgcgcctgttgtcacagtaaagacatcgggcggttgtgtgagagaggggaatgccgcagcagaggaaggaacggagggctgagtgatgagattgaccggtccattggccggtgacgggatcaggagcgggtttttgaatgttcgccagtattgttgctcgggcgttagctgcgtcgagggtaacgaggcgagcttgacctgctgcagaggcaggacgggcgccgccatggttgcagtggtggatagacagtagttatttggggggtgttaatcaggtgggcaacccgaaataagcaacaggcgataatgttaagccgactagagtgctatcatgaagttcatgaagaccatcttttttctgccgatcaaaaaagttcgtctcgcccaatcgggaatggtggcggtagcattctctgcctgaggcataatgttctgaatttttgcctgaggccacacggcagaacatcaactcttggcattcttggcattggctttgactttacatcaatcaaagaaatggctgacacagccagagcctagactggacccctcgtaagatgagtctgagggaaaataaaaaatgaaatgtaaaaaatacctcggctgatactttttcgcccgagccattggaagttctctgcctctgatttcaatgaggctggctacaagcaccattcctcggctgacctgccaggctacataatatattccattctcgggtaatacatcatgtaccgagtacgaagtattaatgcttttacatatgtatcacattcatcagattgatcagtctaaagagattcccctcagtaagcccaactttttttcatcacttgacctaaagataagctaaaaactagtggatggatacatatgcatacaaagtacattgtacagcataggcttccgcaatttaaccatccgcaatgttaataatagtaaccttggtgggtattgattgcccaacaagcccacttgaggcaccggcacaggcaacatcattaatcataaagcgtctagaacccgtagaggatgagcaagcgaggcaagacagtctcaccaatattgccaatgtatgaaaggcatctcgaatctcactaggactgtgagtggccactagtcaggtcaatctccagtgggggggaaacggagatccatcggggtgcagctgcctaaccctaaaggtggggaggggagccgcgacacttcacagcttattgaagcccaaatgccgctggaaccggcactttttttttccacaggcaagaggaccgagaatactcggtacgaggcactgtagatgaatagcgatagtgtctgggccatccaatgatcggcgatatacaatataaatctctgaacccgcggtggctgggaatccgatgaggccgcgggatcagatcgcgctgagggatccactacatgcgggaatacctgaccggggttggccaactgaagatgagttgaatgacatcatgagatatatcgcagcatacacgaggattaatatacaagataggattgagaatggcacgaggtgcaaatagagagcgacttacctaacccagtggcttcctaactcggtagcggtggtcgtagcttcccagttccattgtttactcgcatgcaaggtttgtgtatccatggtatggatgaatcgccccgtccagacaccgccaggggtagggaccaatcatatctgaggatctgttacaacccccccagccacctccaatccccgtataggacattctaagagtatgttttctctttcctccttccccctctccacactgtagacattgactctatggtcttttctgctcatattcaatacatccagtgattagcaactggtcacgaaatgtcgaagatctccaaggtcaaccatgcagcaggcatcttcgccgacatatccgtcgatggccccattattggcacattggtcgctatcgttgaccgagcgaagaacctacccaaccggaagactatgggcaagcagaatccctatgctgcagcacgactaggcaaggaggcaaagaagacacaaacagacttgcgaggtggacaaactcctcgatggtaagcattgagcctgatagatgtacaaatggaagataagcttacctgcctagggactcggaactccgatttaccgtacacgaatcacccgactacttcaaattgaaggtctccgtgttcaatgacgataagaagaccgacctgatcggtgaaacctgggtggatttacaaagcttgatcattccgggtggaagccaaaatgatcactggcacccacttcaataccgtgggaaatatgccggggatatccggattgaaatgacctactacgacacgagacaacaagatgaggttctcattggacgccgacaagaagccgccgaccgggtccaaggcaaggtccctagtactccaggcagcacgggcttgtctggcccccgccaattgaaagatgtcaaacgacgacccttgcccagtggtccttcaggggcctcggcgagacaacctgtggaacaagctcactctccacttccacttcaacaaccggtcccatcgagacccgccatccctgagcattcaaacattgcatctagtgctccggaaagcacatatgccccgagatattcagagcctgcttacgatgcatcaacatatcacgccccttctcctgtgccgcctccctcccggggtgggtatgagagcgatagccacactcaaggatgggacactgcatctgttgctcctctccgccgaaaaatcacccatgaactgccttacgcttcaaatgaagttatggaaaatacatatgatccgcgtttgctacagcagcagcagcaggaacaggaacagcagcaatttcaactgcatcaacaacagctgcatcaacaacaacaacaacaacaactgcatcaacaacaactgcaacagcagcagcagcagcaacaacaacaacaacaacaacaacagcaacagcaactacggaatcgttccgaatatgatcggccaccttcgagagacaatcgcctcaccaggcaaagccagtacgaggcagatccctatgaggaagtttcatacctctcctctcaagactactctcaaatagagcaaccgcgatacaatccggaccctatgtcatatggcgcaacccatccacacgatgtgtcaggttcagagttcatgtcttcctttttagggtctgtggatgaaccgagataccatccaagatctcgccctctacaaatcacggctcatggtcatgattggcacccagagtatgctggaatgcaaccacgagtagaggatgaagatgataacggaccgccccctcctccaccggcacatcggtcacggaggcactctcaactgcccaccccgcaatcatcgccccactcgtatgcagcctacacaccccagtccacacctcgatcctcggctccccatctaccatcaagcatgcctaccccgtcccaccgcgatcactatcaggagccttctttaatggagaactctcccgcgatgcccgcaagcctcgttgcaggtcatgaagtggaagacccatctgagaaagcagcatttgagcgatcagtccgcagacgcagcacccaatgggacgatgagatgatgatctcccagtcgcctgtactagctcctgtatcagtccccgttcactacgatgctcctgtctacagtctgcgaacatcccccaaccctatcgagcaaaggcccacttctagcagaggtggatctgtcagctctgatatgcgggctgtgactcggaaatccgtcagtccgcggccctctacttcagacgtcggtggtggctcttcagtccctttctctcccgactcctacatctcgctaaacccgaatgcctctcacaatcccaaccgagatccttccccggcgtacaacacacctatgcaggctagagatgctgtgatacgtggaaagactgaaccccgtcgagacggagatcacccaattataggagatgatggtcgggagattgacccatccgaccatcttcccactgatacatgggcacccgaaccagaaaggaagaaccgcaagcctgaggtcatcatccgcttcaaaaactcgccccggccaacttctagaggcaatgacgctcccccaccacgcagcacaggccagccacgcgtagcattcaaaactgagaacaacacctatgcaccagatcgcccagtcaagttcacacccccccaggtgcacccaaatccagggtcaatggttcgagctccacctcggccggactacgcgcgtgaacgctctgacagctacgcgcgaagtcgggcctacagcgcgaccacttcggttggccggccgcgctcttctcgaggctctgtttctccaaacccagggtctcgtaagccactgtatgactacagcccaggtcccccaattccaagcaaagtgccaatcacaggaggagctccaagctatcccgtcatgtctggcaatacaaacggaaacgaccgcatggatgccctcagtctagagctgagtacgattgacattggctctgcagcttgcaaccctggccggggggctgttcgaaaatacgtcccaagacagccagcttcaatcggctacgctaggtaaaacgatttgctttttacatttatgcatgatttatgtactgctatttttctttggggtccttggtgtggttggtgtatctctcgggtccgtttcgattcttgttttcagactgcattgctctggcgttatggatctgatctacggggaaatggggcttgatcatgtacaccataacgggaataaccaagcttggaatgatatcgtaaagtgacatttaattcttactagatgagtgcttccgtagattagagagtatcttcaacaagatcattgatgtaatcagttgctcgatggtctgacagtagacctcagtgtgcctatataggtcttcttgatatcctgggttttccagtgattatattccctgctagctccagctgcctgtggttgtctgtttgcacatgcggtcgtatatggagacatcgtgctcaggtcatgccaacctgattacctttacaaccttctagaacatcatgatcatgtctctctatatataaataccgtcatactcaataaatcatcctagagactaggttgttccaattgctactagctacaaaccagcacacacgatgtaacgacagagctcttactgtagaagttggcagggtaagaacccaataaaggaaaaaaaagccatctgaactcgacccaagtcaaacgcagtaggtaagttcctgcaaagttataaagctcatcttattacagctcccctcttccccctctatcctattctcgcaccctgctttccttttcattttggctcaacaccaggacccttccacattatcagacagctttgctatcaaaaaccatctatcaaaaaccatcaggtagtgcgttcctcatcaagaacgtacttcccatcttccttcgtccttgtcttgtttggcatgtccacagccatgcaaggtcagggctctgacgtccatggccatcaaggccatctccctgaggagaacgtgaaaatgtacgtatagtaacatcccctcaatctactcggtatcatgagttgaaaaccctatccttcttgttgacgtgaacgtcttttgattttgtcttgggatcgttttgctaacctatagagctcagacctagcaacaatgtccacatcaaccaagatgctttgacgtgagtatacgctatatcccctggcgtcgttgtgtgcctagcagccaagcctatactatctggtatcaagcctttagcctcagtcttttgatagttctctgccttgctatcactttttcattatctacgaacagtgctacgtgatacaatcccatcttgggtgttggaagcatcgtgttctatgaagatttcagctaaacaaagtattagtcctgacagtcccaatcaaacaatccaccaggagaaccgagcgctgtcgctacttctctctcctccgcccagttcgcctttgatacctctgggcacaatcgattccgcacccacccaatacagcccagaatatccggctggtccccagttcaccagaatgaatggatcataccgtgtttataatccaattcggggagcggagctcaggactgcggccgatcttgccaacccattcagagacagactggatcaaggtggccagatgcgagaccatggaagggctcgcagtagaagcccttacagctcgattcaatccaacgggcttcttgaatcccaggatctaccagcagggccagcgaggggattcaatcactatcctcgggaggtgtatgttccgcctggcatcaatgacatgatgcatctgaatctgcctagctcttctccgacactgtttccggacaacacccatagtggtggtcgtgatcttgctttgagcctcccaggggactctctgggacagagttaccatctcaatgatggcaattggtatggatacccccaggagcaacagcaacaacaggtgcaagggcccgaaagaccaccagtcgccaagcaagaggaggaggacctcgacgacaactacgaggaccatttgtgcgaattcgctgcaccatgccgaatgcatccctcgcctgatggaatgcactaccgaaaggtagtatcgcatgtgttcggcagaaacaaggccgtcaccaagctgtttccactcggagtttgggtccactactgccggaagcactaccagcgcgcccggtatcgcgcagatcaatggcctttcacacagtgtgacctcctgcttgagtcactgacacgtatggaaagctgggatggagtggagagcttcgagctgatccttcgccggcgagagcaaatgcgtgtcgggcgtgaagctgagggcacaacgaccactgagacctccaagcagaaagaggtcacttcctccggcaaggcccaagatcagggcaccaagtcttcggctattgtcacccgcccgggccgtagacacccaactgccatcatcgcccctgtcccagactggcttcggcaacacgttggtcatggcaagacctttcaggaaatccgccagatcatcgaaatggtgcgcagccacatggtccggctgcgaaaccaagaacgagcgcaacagcagctcaacgacgttcccaagtccccaggcaaaccaggaagccttcgtcgaggtgcatcctcgagcatccgaaagggacgtaccgcgaagggccaaagcccccttcccctgcgtcctagcacggttcgattccccgacgttgaaatcctcccccatttcaagccctgggtgaaggaggctgctttgcggcagcgatctgccacaaacggcccaatgaacatgaacatgaacgagcccgagatcaaggacgagtcggagcagagaattctcggtggtggacgtgtccttggagaaatccaggataaccgggacaccaatggcgctggatccagccaggcatcaaacggcgactttgcagctacagcagcgcagcactgcgagggccgcctcgagtctgttactgctgtttctgctgacgacaccgctggggtcaatctcttgcaggtgcagcctcacatcggtagggctgggaccaaccgtggccagtctgagagccagcgccgccgcagcgagcgggtctatatcaaggccctagatcgtctccctggccagagcttgaacaagaagaccatcaaggaggatgaggaggaggaagcggagaatgaaatgtagtcttccattggaatcggcaatctgggttgtgactcatgcggatcgctcatatctgagctcatgtatccgagttctattgatgtcagataaagaaaaaggatcaggttattggcggatgatgctccgccggaatgttgcagaagtcgagttggttggagtgctgaagggactttaagtatgctgcttgatcgcgcgtttcgcgggaatatcgcgggcgaatttgattctcaaaataatgaagcggcggtgatagaaatttgatgtaagagaagttgaaatctgaaggaaatgtgagagaatatatttccgtgcacagcaaacaatcaaatttgatcccattgcgttgatatccgatcaatgactgcctggtcatgtagttgtcttcattaattctacgatggcaaactccatatacaatatagggctatgcctgacagctgaaggcaatttcaacgacattcggaaattcgagatctcaaatcccatttcagcttcatcagagactaccgatatacatatggatgtacccataaacagtgaaaatctaattgaacgaatatttgaatgcgaggaaaaaaaacgagtaagaagaagatccaggacacatactccgtacaatatagacaaccgcaacaatacgacacgcttgctaaagacaccgaaatgcaaggaacaaaaagtccctatgcaaccacccaagtaatatgaatcaaaaaagagattaatgtaaggtaattatcatggtagtttttgtatggaaaaaaatgccaaattcaggtctctaaacagactggtctagcttgccacagccagctgggcgacgagatcagacgccacatcgaggaaggggtaaggactggtcacctccttctccttgttcttgaggcgtctgctgatgggatgccattcggtttcgccatgagcgcggatcacgttctggtagccatcgcatttgaagtcgaccatgtagttgttctcttcgagttggtagagctgtatgtcgaggaagacccagacaccgtaggtgatcttctggagtccgcttggtacattgactgaggagtccgcactagcgctctcggggacggaggactggggttctctgcttcggtcttccgttggggcagagattcccgagatgttgaaacggcggcgcagttcctcgaggtcactgcggctactgtaagcactggtggtgtctccaggagggttgatgccttctttcagcaggcgtgcacggataaaccatgggtccttgggaatgtagtagtcggatgggaggtcggggtatttgctctgcaagggtttgggcttatcaggggagggggtcgcatcgggaccaatattggtgcctagagaatataagaatcggctcaaaatgagtaatgggtggaaacatacctgattccacgggttgaatatcccacaatccaccctgggcagcaattgcccggtacagatacagcatggcctcatatggctggtttcgggaccgaataccaaactgccatttacggctccgtttgggctgtttttctaggggttgaccggttggcggctcgaatcgcaacttgtccaagtcgacgacactgcgtgagtggggcttcaatgcacgggctgtggcagcctgttcttcgggagacatgtcccgataggcagatccctgtccctctgggtcaagcttgatggcctcttggcgacgctgctcgagcatttggttgcgagctcttttatctcgatcacgttgttccatgagttggtcgtgaacgtacggcaagctagtagggaggattcggacgtggctaacgcggagttcgtcctcgtctgattgctgtggatcttccgaggccctacggcgcgatgcactagcggtcctgtccatggtgggggcggccggggtcccttgatgacgaggcgcaggagtccgatccgcagatgaaggcgcagctcctttctgggcattttgagctaacaaattatcatccgagggtgctatcgtcgttagcagaggtaggttagtttagtagatcaagacttacaattagtttgcatcatctcattctcaacaacgatggagaacgcatccttgatcgcgctgggttcagcttgtctcaatgcctcttcgatatcttctcggccatatcccatgcttcgttcgagcttggaaactgcaattcgatggattttgctttgaaccgatataggctttgctatgtcaagccttgcagaatcaaccttcttcgggtccacccccggggcgatgaattcctctcgtggtggttctaggtacttggggagattcttcttaaaccatgggtcttctctgatctcagggattgtaatgcggtggacggggtgaacttggagcattgcccggatcaaacgagctgccccggatgaaacatatccaggtatgtggaaggtgcccgctgcaatcttcttgaaaagggctggaatatagtcatcatcgaaaggcaagcggcccaccaacaacacatacagaatgacaccacaactccacacatcgacctcaggaccagcatagagctttccggagatgacctctggcgcagcgtagttcgggctaccgcagctggtcttcaggaagttgccatccgtcataatattactcaaaccgaaatccgcaatcttaacgttcttctggttgtcgatgagcaggttctcaggcttcaagtcacggtgtacaatcttgtgtcggtggcagtattccacagcacagatgatttgctggaagaatttccgggcttcatcgtcgccgcatcttcccttcctcacgagataatcgaacaactctcgctctgcgtactccagcaccatcacaatatcggtcttggtcgcaatcaccgtatacctaaatcattggtcagccaactgaaatcccaatttcagtgtggattgaaattgtacaatttgatgatgtgtggatgtcgtagcaattgcaagtactggatttctcgctccacgcgcccaaccatatctctggagagtagtttgcgtcgggagatgatcttcagagcaacttgacgtccagttggctggtggatagcaagcttcaccttgccaaaggaaccctcgcccaagacccgtatagtctggtactggtcgaggcgttgcatatctcgggtagtcgacggtgactgcaatgggtcctcgatcttgctggtcggcctcgagggcgcgggcattgccatggcggaggggttggaggcgggaggtctcgcacgttcacgcggacgatcacggtcggaggggaggggaatagcgaggtcttcctcgtcgaatgcagcggccatggtcgggaataatgccaacgtgacgtgattgattttccagacggttcagcggtcgggactgctgactgtgcagaccgttcagtgcccgggagggttttctctctattttttctctccaaacatttgccaggcgccaatcagttgatcagtctcgaccctccccacaatagaaccgaatgtggagctgggcagctgtttgtcgggtgggggatggaggggtaaatttgcttgtcaggggttgaagaagtgaagaaaccaaaatggactgaagttttggatgaggttgagtgattaagccaatataaataggaagatcaatgagatctggggagccacctgggcatgattttcaatcaacctcgtttgtggacattgatggagttctagaccttacctaagctagttctggggcacatcatctattgtccactgtgatatctacatttacaggacatgttagcaaggaaccctgttatgacggaaaaatagtagtatatagtaagagactacttttcaattactactccgtatcatacttctgaatattcaccttgacctatgttatatatcagccaagctttgtcggtcaacacagcagctcctctttatatcttatgccagccctaatgcaatgcatatgatcctagctcgaaggttggtctgtgtctccgcagactaacaactaaatagaactagttaacaaatacaacataaagcttctttgtctttcttattttttttaaagagatttcgccgaagcgatccgagaaaatctgtgtcataggcagtgggtcaataatacccttaaagaactgtggctgaaagtcaattgatcgagattgttcattatttacacatttccagggtagaatagtgcatttcccctaagcacttggatcttaagttgactatatatgcgggttcgtggatatgtataacgtgccggctatattatccagtacgctaaaggtacaaatgcagccgggctatgcaacacagccactgaatcttaggcaattcagacaagagatataacctcatcgcatctaagagagtggagacaaataatgtacattatgtattgaatatccatctatccatctatccgtcgaaattatattataacgagacccagccttggaagagaaatggaattttcttcccgtaaaagagacttggatggtacctgggccttctagtaaattgtatggatgaggaagtaccccgggagtacgtgcattgagtcatattgcggcttagagcgatcaagcggggtgtcggggtcccaaattggattagcgtcgagtcggggacctcgaaagggaatggcggactgggagatcggagcatacatagaatcaaccgctaccttagctcttaggttccttcaccttccccggaagccatacagagttaccgttcctttcgtcttctttacgatatcctcgatatcttagtgtcctactgcctcaggatccttagacgtggcctgactaacacggcactctctctttgacttttcccttttcatacaaaatagatacccttggtgatacccactctacgttttcttttccaatggctttcgttgcggatcaattcttctctgagatggatgcgacaatctccaatgaatgggttgacttcgatcaattcctcgatctcccttcagcctacgatgaccagtcaaccgctactaccgtctcacctcaagacctagctctgccctatgaggcagatgggattttcacccccccatctgatttcatgcaatcctccttcgacatgaccaactgtggtttcccacaagaagagttcatgggaatggatggaggtttcatgcaggacccggctgttcctttgttcgatgatgcttcgttcttggcgtacaacccatacgacagcagcaacacattccggaacctggtggaggcacaggctgccgctgacccgcgtgttggttctatcaaggagaagcgccgcgaggcagggattgcactacacttgcagcgcctttgtgatgacactgctcttgacttggatatgtcctctgactctaacaccagcttctcatccccaagctggtcagaatacgttcgcgggagcatctctccgcgccctagcccggagaccacatcggtctccgaggcaccccctccaggaggcatggagatgattctcgacttgaacatgaacgccgcagccaatgtgcctaggaaacagaaacctcgctctcaggcacagaaggagaactacatcaaggctcggaagtacggtgcttgtgagaagcataaaaagcagcataagcgagtacgttttccattcacattaaccatttgatcaccctaacgttcgagtagtgcaactgcctggagaaggctgctgctcgtgccagcgatgttccgatgaatgccgcactccaaccacggccgaggcaaacgacgccccaagtcccgacctcagagtcacggtactcggactcgccgggtcaccactcattcaacccagctcaagcgcttcccaccattaaggcgatcaggaaaccaacaggctgcacatatggggtcgatccatctatgggactacctgtcgcagtacccaccaccaagcagaatatcaggacgaagactcaaaagagtacgccgcctggacacgatattgttctgctatctggcaagctcaattcaaattccaattgcacgttgaatcaagacaacgttctatcatcgagccgaaacgccgcgaagggtcattgtgccggacacgacatactcctatctggcaagaacatcccaaacaactcatgcgctggacacgagcgactcgtcacccaagagaagatctccaagagcacagcaagtggacagccccacaatacatgcagttcaaattcacctcggccggcccacgcagctggggtgtcatctggcagttccagcttgcgctggtgcgtttcgacctcgccggttggtgttgcatggtccgagaggactgtcaagacgtcctcggcgaaccattcaactgcttgcgacggtcgcactccaggcttggatgtacaacgaacaaggtccactcccacgatggcaagatccatggtgccaggtactgttgctggcagccttggaatgcgccattccactttgctacgcaactccggaacccagctacctggatcggatcacagggcctcagaaggacttgcctggcaaatctcaaaaatgtctggtctcctaccggtgccaaacgatctaccggtctcgccgtctcggcgtggatcatcaggtctttctggaactggacggccactcatcagcggagacagtcttcgtgttcgatccgctgctgaaaggactcgccgcctgcttaccagtactgccttggcattttctggtgcctggcaatcatcactgtctttggcatctggggttgaaggcgtggtttacaaagctttgtctctatttgcccgacatgttgtgtctgcgaagaagggcttatatctcggcggactgcggaacgctttcgtatagctgttctgctgttcttcgatgaacgtcactggaaggaacatcttccgataattggctggcgttgaacgatactgaattgtaaagggcatgggtgatatctattgtcacgttcgagttagctgtccctaatgatgaaatcaagcgaaattcatttgcattatttaatctccagcaaaccctgtatgttcgcagtaataatctaggagccccaggtacaattagttatatgtggtttcaaaagcaacaaccaaatatatcgcttccttcttagagctcccattgaatcggtaccaatatttatacgcaatcaaaagtagttcaaaatattgcatgtctgatgattatacggagcactatcgaggttattttcagaaatgatagacatcctttgccgtccccaccaattgagcctaatcccgcgccagtcctttttctcttgttcctgacggttcaaatcaacacgcatactttcgcttcgacttcaaaaccatgcactccccgcccctgttccgcttcactacagtgacggggtattttctccaggatgaccccgctacggaccccgacaccttcgactacgtaagagacccaaataattctgtcaaaaccattgtctgatgatctgaaaaggtgaactcaaacttcggcctcatcgaaaaacaatacgacgagcatctcggagtagaacagaccgacagccagtggcagcgtttcgacgcccacattaaacgacagaacgccagcaagagcaaaaagctcaaagttctcttcctcggacgccacggcgagggcgtccacaatgtcgccgagcgcaaatacggcagcaagaagtggaatgtaagtagccgagtatttcctccacgaatcaaccagacggcaaccagcactctaggaatactggtctctgcaagacggagacgaggacggcagctgggtcgatgctcgtctaaccgagcagggaagatgccaggcaaaagtcgcacacgcagcctgggagcagcagatcaagaccggcatcccgtcaccggaatcctactacgtgagccccctgaaccggtgtcttgaaaccgcgcagattacgtttcagggacttgcgatccctggcacggatccttttaagccgactatcaaagaggtgtgtctgtttgatccctactacggagcgtacaatctaacgagactagctactccgtgaaacgatgggtcagcacacttgtgaccgtcgctcgacggcttcggaaattgcagacgagtacccggagtatagatttgaagcggggttctctgaggaagataagttgtgggatcgtgaggtccgcgagtcggatgagcatcgcactgagcgactgcgtggtcttttgaacgatatctttgctcatgatgagagtacctatatttcgttgacggctcattcgggtgccatcaccagcattctggaggttttggggcatcgtcgctttgcattggcgactggtgcggtgattcctgtgcttgttctggtggaaaggggggtaccatcgcagctggagtcgcaagagctcgcatgatcggaggattgcaactttataactgacatgggtgctggggttgataaatattagagcagagcagaacagccagtctcaatggtttggtatccaagaaattgattcagtattgtacatgagtcgcttctactcaagaaagatgagagcgacttctcacaaatgcaattgtcgcctccaatcggctaatgaaaaaccactgtccacgcgaaagatctagatataaaaaatacaaacgccaaagcatcgatcaccaactgtagtactggttctgcgcagaaatcttgcgatctggcagttgtgtccaaagctgagctctgcgctcccgctgggccttggcctcacggtcttcccattcgcggatgcgagtcttctcttccttcaacaggaccgagagacttgtagtagggggacgcatgcggttgatctgaccacgggcgcggtgatccatctcatatccgtaaggaccacggttgacccaggcctcttggatgtagatatcagaggggttggcaatcttctgccgctcgccggtcttcagtatgacagtaatgggtttcgttggttcggagccagaagccccaaggcccataccggcacggacaatggcgacattctttgcgtgttccagatgttccaacacgtccttggcggcctttttgttgctgaagcgcatctggaggatggcttcgtcgatattctttccagcgatttggcgggcgagaggacccagcttcttcagcgaggtcttgatccagtgagatctggagagcgattcgcgctctgtgcgcttaatttgcacctttgtcggtacacggcctcgtttccggatctcgcggacagccatcttcctatcccatcgcagctgggcccgggggtcgggagccaatcccacttgcaggcgacttaagtcgcgatcctccaactttccggagataccttctttttgttcccccgttgccctggatggcatgggaccggatgctggtgcggcaaggtcggagccgaagatggaggttgctaaagtaccttcttccttcttaggggccgaaggtcggtgggtgactttgggtttttggctggatccgcccgtgaacaagttcttcaaggaagaaaacaaaccggtcggttttttgctttcgctatctttcacggcgtaacggatggctgtcgtggtcaatgttcggcgagggacgaaggagacggtccggacagctaaaggtggtaagtcagtaggggaggtcaaggatccgatatatcaacacaacatacctgtccggaccaattgccctgagcgatagaccattgtggctgttgggatgttgttgtcagaagttcacgtcgggaaaaaaggtgaaagttccctgcacttgtggtctgtgcgggacaccggagcctgaggcaccttaaattgatcgatcttctgagaatagcttcaagatatgcgacttgtgaccacaccagtcgatagaacaagaacaggcttatctacagctggagatgatgtcgtatatttgaggatcaaattcgaacctcattctcgcgacattactgtttcgtcttcccagccatctccacagtatccactaggcctcatctttccctcttccagttcttctctctctcttttcatcttccttcatccctcccttcacttttcaggccatcagcctgttgtttatatccctttcgaatatctgatattcttgagatttcagcttgccctctcggttcaaggactctcgttccctccaggcattcatttagattcttagccacccaccagaagcagctgcgcaagagtaaatctacgtcatttgccggaacaacaacgaaagacgatctggacacgaccggccgatgcaggaatggacgtgttgaggtacactaagaccgtcgtatgatctggatctccgctcgaaaagtacctgggatccattacgacaattcccagtatcccatcgcttctcccaaagctctatccaaatatggacatcagttcgcttctttcgccggactcgaatccaaagtctggaaattcgacgcccgtgcctggtcctacgtcgaacaacgcaccggccacctctgcagggccatccccccacaaagctatcgagagaacccggacaggctcgagacgcaagggcaagatctcttcgcctctcgcacagcacgtatatgttcctagtggagaatcttcgccaggactgagcggaggaaatgggacttctccgactgaagtacattcgagacaaccatccacgccgggaatggataccttagcggatctcgcctcgatgcagcaccaccagccacaacgtccaacaccgaccagcatgctccggagtactgaatcctatgagcatcagttatctccatctactattcacccccacgtcaactctatcaaccacaacacccccacctctcggatgtcgttcgagctcgccatgtcggatgggcgcgacgggcccgcgaagcggacctacgccgcgacttcgcttgatccagatgcgcaacgtttggcgaccgaactttttcatcaaatatcgctcaacccccacacgcatgacgcgcacgtgcaatttatcggcttgctgcatgcaggattcgttaaccacgtctaccctccgaataacccagatgtccacggtgacccgcgacgctatgatctactcaacgatttgaaaacagcacgcgaggaaatggacaagctgttcgcgatgggagaagatctttgggccgaatggattcaggatgagagtatgttagcccaagatgtcgacggtcgcattgctgttctagaactctgccagcgatccgtggtagaggagtttggcagcacaaaattgtggaatatctacggcgagtgggtactttatctctacaattccgctcatggcaaaaccagttcccagtggaccgaagaggatcgcatgattgggcgcgaggtgttcacatgggattcggtcgtggaggtgtggcagcgaggtgcagacgctaccaaatggagaatcaacaacagccacttggtctgggatcgccttttagatctttatgctcaggacatcgctcgcgaaccttctcaagagaagatcaaccatcttcatggactgtacagtcatcgtctgcaaactccccacgccacctgggaacagaccttccaaaagttttcaagcttcatttccgcttattgcaacagcaagtatgaggagattatgtgtgaaactgttgctcgcgcagcggaagcaaaggctctcttcaacgcacgggaggaattcgaactgcgcctggtcaaagcgcaagagtctggcgatcgtagtcttgaatgggctgtttactccgagtacattcactgggaattgacgcgcaaccgccggaaacgaggagaattcaacttcgaattggtgaacgccatttatcagcgcgctgttcttcacttccccaccgatgtttcgatttgggaagactatgtcatgtttttaatcggcgaatctattcatcgccacgcttctaccacgacaatctctaccctagaccgtgccacgcgtcattgtccatggtctggaaacctgtggtcccagtacctgctaagctcggaaagagaaaatcagtcgttcaacaagatttcgagtatcaaacacaaggcgaccagcactggactacttgatgctggtggtttggaggaagtcttgaaggtccacgtcacctggtgcagttaccttcgccgacgcgcctttttgtccgactcgaccgacgaagatcttgatgttgcagaagttggcattcgctcggcaatcgaaagcgtgcaagaactgggcgaaaagaagtacggcccggcgtaccagggcgatcctcttttccgtctggagcgaatctatatccgtttcctcagcgaaagcggcagttgggacagcgcgcgagagactttcaagggcttagttgctcgccgtggcaatagctatgaattctggctcgcctactacgaatgggaattgatttgctggagcaaatttgtgcaaggcgaggcaactgtcgacgcagcgcgtcgaacccccaacccgagctttgctactgctgtgctcaaacaagcgatcaaaagaacagatctagactggcctgacaagattgttcagacatatgttacacattgtgaggactatgaggactcagatgaactccagctagctgtgattgagactcggaaagcgatgcgagctgtcactgcccgaagagagagggaagcgctagaggcagccgcagcacagcagcagcagcagcaacaacagcaacagcagtgggaggccgcagtgcaggcagtcccttcacctgaaaagcgaaaacgcgaagatgagaaggacgggatgccgcaaactaaaaaggtccgcaaccaagaggcactggcggaggcccctgctcctcctccacgggatcgagagaatgcgactgttatcgtctcgaacttgcctaaaggtaccactgagaatagcgttcgtctatttttccgtcatgtaagtgccttatccaattactatcgggagaatttagctgaccaaacagatcggtaccatcaataccgtcaaaatgctccgtagagacgagaaaagctccgaggttgcgatcatcgagttcgagaccaaagaagacgctcttgctgccatcactcgtgaccaaaagcgcttcaacgacactgataacatcatcgacgttcaaattgggtcagagacgacactttggatcaccaattacccaccggatgcgggtgaggactacttccgcaatcttttcggcaaggtaagtgcttcaccctagcctttgtggcaaagctgacttgagcagtatggcgaagtacttgaaattcgaatgccgtctctcaagtttgacacttctagacgcttctgctacttgcagatggatacctcgagtgctgcccaccatgcgacagagcttcatggaatgcggttcgaaaatggtacgcggcttagtgtcaaaatatccgatcccggacaaagaacagcccgcagtggccccagatacgaaggacgagatatttatgttgcaaacattgcctgggatgctaatgaaaaagatctgaaagaactattttctaagttcggtgaaatcgaaagggtgttgcttgagcgaaagacgaatggtgccagtaaaggttttggctttgttactttctctaccaaggacgctgccaatgatgccgtcgcaatgaatgaacatgtgttcaagtcacgtcctcttcgtgttgaaattgctaccacggacagccggcgtggtaaccaactcgtcatctctcgagttgcatcacacccggcagatcacggtgcccgtggtcttgaagtgccagttggtgatcatgcacagcgcacacttgctctgatgaatgtccccgataccgtcaatcaagcccgcatccgtacccttgtcgaaccatatggccgtttaatcgcgatcaatttgcgcccagaacatcaaggtgctattgtggaatatgtcgatattcaggacgctggcaaagctgcgttggcgctcgaagggaaggagatcattgctggacgccctctccatatcggcacggttcgagagatgttgaatttgcaaccggaagtcaaaacagaccgagggcaatccgccaagcccgaacgtataatgaagaagacgaacctacaacttactgcgccgattagacgcccgcagcagcctggcgctcggaagggtggtggtcttgggatgaaacgacagatcgtaagttccggtcagaaacaatctgctgccactccggccagcgacaaaaaggacgcgacgcccgacggcgagagcaaaccaaaaaagagcaacgatgatttccgcgctatgctcgcacgaaagggtccggaatgaagtgcaagtgcaatgatagcgacaactatggcgcaatatttttttcggcattattcattcggctggcgtttgtctgttttccggtggtcatcttgctgcttcctttagatccgtatgtattcactcgggtcggtcttttccgtcatgatttcttctttgtttgtggcacatgccgtcgtgtatattatgactgtattgctcttagttctaatgatgatgtctgttccgaggggctgtctccgagacattgccccggtgacttgaaagaactggtgatctatatactgtagtatatcggtgattcttcgattctttaaacttgactgtatgaagaatccatgtctcatttaccatattttatacattatcgctgcagaatggaggtgtctgattggactatatgtcacgatcatgcaaaacacattgacgtcaaccggcttcacttggtcaacttcttgattctctgcggggaaatacaaaacaccttctgatccattctaatgggttgcacagagatttattgaaacaatataccccttttcatctatatacatctcctcgaatcgctaaactcctaaagtctcgcgtgatcctgattcttatcggaccgattagcccctctcatacggaataccatccctacctttacccgcatcgtctctatttcctgtgtcttgcttgggtttaggcctattgacacttgtcataatatcgctgctctacattcaatgtgcagagctatcaccaagcaccgtgaatattccacgtcatcgcatacctacagcaatggacttccacctagtacctcgcggtaccgatcggaactacacaggatttttcacaaagacaatagtctacatcgggacgctgatgatatttctagcctgtaggcaaactttagcgactagccagacactcaaacttactaacaaaatctcccagcatttggcttgacagtatcctcgatcgtcattccaaaatgggtcagctaccatagtgaaaaggtacgatgtttttgttcacccccgacaagctcctactaacaatatgaacctacagcccgatatcgaatactcctacggcctttcccgccgctgctcctcccttaccaatacctgcgagagcttcccacaacgcgacgactgccacggcgaagacaggtacttctgctctatgtggcgctcggtcgggttcttgatgtcctttgctgtcgttctgcagagcattagcttggtcacatacctggttatcctgtctggcgggaaacagctgcgcgagaatgggtggagttttcttagtttgatggttgctttgtctgctattgtgcaggcagccggaatgtcgatcgtggtgggttgataatatgtctatatctgggcccaagatgacttgtcctaatggtttggtttacaggcatatctattcgataacgaggaccggttcttcatcggctggaaacttgaccagtcctggatcctttgcactgttagctggtgcttaagtgttctctgcgcaggcgcggttattgtgtctggtaaggtcttgccctcagagggcggatacgagttgattcctgatcacgatgagcttcgagtcacttgatagtgcccaatgtagcattcatggctcctggatgaatcacgcgttacgcaacagacgaaggatacctatctaggtatcattcgtctttgacgacttcttataattctgctatttcggtggttgcagattgacgttttctatcttttgatttcgtgcttcggcgttggggctgtatacgtcttttatgcttttgaaatataacaacacaactaatatggataatgatttgaataatatatctctctatggcaagataggtttatcatttcatatctttgaagacatgtagaaaaatgcaatgcgacgtagaagcttcatcattcatctcatacagtacatttcctcattctcaatctaccagacaatttctttcccattcagcccctcaatagccggaatcagtggccgcagcgcttgaccatagtcacccccgttcggcgtgcgaagcagagtgtgaatgtggaatttcttcggctcctcattattcaaaaacacaccagagtgatgatcaaactcaacgaggatcaccggattctgaatacggtaatagaatggatcctcatcaccataccccccaatccaacaaaagtacgtctccgcttcatgcgcgcgcacctgattaatcttcatagcccgcgatttagccggcaggtaaagcagatattgctccagaatgccgtacacgagctgcttctgcgcagtactaaaactcgacacgagaataccctcatacggcacctcccggttgtcacggtacgcaccgcacagatggcgctggtcatccttattccagcgaccgggcggcatggctggatctttcatgtgggcaaagacacgagcggaagcctgcagctccgccgagagcgactgcatcagctgcaacccgagcttctcctcgatctgcaagatgcgcgtgccggcgtaagggccagcgtcgatctcgtttggctctgcgcctgtgaaccacggcgacgcgacgatctgccctttatacaagaagacgttcaggcagagatgatggccgtagaatgaccagccccaggggcgtgtgattgatgggcggccgaacaggacgaagttgtaggagaattcgttcatcactgctggcgacttgactagctcgccgaggaagtggttgatgcgcattgcgctgacggctttttcgtagccttctggtgagagcgttgtcttcaggacgttcatcactgcgtcccgggtctcgggggtgacttcgtcgagccgaatgcccttgtccgcgagtaggaactccgggttcgaccatgtgcgccattgcggcgagtcgatgtggtagttgatggcttctttttgcttatcatctagcaggctggttacggcttctgctgcgtctacaatttgttgaattgggacgtcttcttcttgtaatgtgaagagacccgggcggacgtttcctgtagatgttagaagcgttctggtatcgtttcagtttagctcataccatcggtggtcacgcctttgaagggctcttggaatagctctagccaatgcatatacagtgcatgtagccaaggtggctgatgtccggtcttaaattcgttcgcgtattcgtgcgcatcttgctggcacatcgcctggaagcgcgggatattgaggtcaggcaagtactggcggtactcgcctgtggtatttttcgatgcattggccatagttaagaatgctataaaaaaataaatcaagagagatgaagagatatcaaggtgttatagcaacccgagaccccacatcaggatgaccggtcttccccacgctcgtggggatgggaaattccttatccgctctggcaagatggggcttctggtctgaccaccggaaagatattatgtatttggagaaatgctatagacacactcttatggtatgcctatagtgttcttagcacgaccgcaccattaagtacccttccatacctatgaaaagaacatccgaaaagacatataaaagcccaagtctagagaaactgcgaaggaacaaaagatagacttcattcgcacagaagaaacgatatatcagatattatacatgaattaccaggctacttatagcctatgagctgtttactgggcaaccaaaaaggtatggacatcccgcaactcactgagcctctcttcttgtgaggactcggatattccgagtgattctccgcatgaagtcttccctcatattttgaaaatcccataactcttgtgcgtcttcctgagagcttcgaaacacgtattcccccggaccttgacaattgcctgatttaatcccggacttttccccggtcacgtgcagtgaggccggtccgggatttccggcctcacccaattgtcgtcgaagaatataagcgcaacgctcaacgtcgttattatcgtctgaagcctattggggaatgtctcgatgatgcagaatcctcggtctccgatccaacagcctgaagtcgagcagccggccgctaagcgcatcaagcggccgcgtgcgactcaagcttgcgacagatgcaggttgaagaagtataagtgcaatgagcgatatccgtgtttgcattgtaaaagtgagtgaccaggttataattagtggcggcatttctctgacaattacagaaagcggctgggattgtgtgtatcagggaacttatcgagagcgtgaaagtagccggtctgcaaagtaggtcgatcactccgcatatccagtatgtttgctaacactcatagttatgtcgccgaactggagaagaagctggaagagctgacctcgaagcttcgtgatacggaagccaaagcttcctctaaaggtcctattccaccagcagctgaaacgttatgctctatgcgcaattcttccacgccacgggatgttccggcaatatccgaggctcgtgaaggacctagagaaatttcagacaagcagactcaagagttcaatcacatcaacaccattgaatgtcacagtagtacgtccccggctgcagtcattggccatctgaagaaagagcttgagccaaaataccaagaagagcatttttctcacgcagctgattattcgatcatctcaacactccgtaatccaaacttgtctcctttatacgccactgggccggggcagatgctgtcaattgaacagtcaaactactatttcgaccaagctcatatctttatgaatggatattttgagagcattcacttcatccatccgtttgttgataaggaggactttttcgcgcgtgctaatgatctttggtttaatcgatcacgcaagcctgagccgagttttgtcgctctatacctcagtgttctatcgcttggggctttggtgcgtgtatgggatgaaggtaccttggccggcttgggtcggtttgaatggagccggaagctgtttggggaggcgcagggatacctgaacaacctgcggttttcgaatgatctcgaaactgctcagtgtctttacatgatggtgcgtgggtgtttctctatgcgtgatcgcaagctaacttgagcaggccaaagtttgtcaaaatgaactcaatccaaattgtaagtgttcattctactttttgatttcaagatctaacagaacagtggcctacatgtatcttggtctcgcagtacggacgtgtctatctgccggctttaatcgagagattccgtgtctaggagataccaccgaacgttctggatggatctcaaagacttggtggtaagtggaaagtttgtctctcgatataaattataactctaacgaggtgataggggtctgttctctttggaaatgtaagcatatcgtgcattatcgttgttaatacttactgataaattagtgagatgagcttttcggttggacggccagacacccttggaatggacgaatatcacaaccgcagcattccaccacgcgatgattctgaatttgccatcatcccatggatgattgattttgcgcagatcattcgacaagtatctgttcaaatctatcattctcgcatctcattacaggacaagttacaacttgctctacagatcgaaatggaaatggatcgttggctagcgaggcttccagaaatgatcaaacccgacattggtggatatagaccgtctcgtagtgccctgcgcgacccgaaatgggcacgaagacaacggcttgtattgggaattagtaagttatccatgggacttgttaactaactcccgactaacgaatttagggtattataatgtcaaaatgttgctcttccggcctttcttaagccactttccgcgcaaactccgacattctccaagcgaattggaccaaacttttgacaaatgtttggacgccgctatgaagactctccaggtgctacatgacctttaccgagttcacacgtttttccgttgctggtatgttcctttgccgagtatcgttcctttgctaactctttaggtggtataacacaacctatataatgcttgctacgtcaacactcctccttccaatgtctaggctcggcatgtgcgctgaaactattcctttgttgcaatctgtggaaatgggcgtggagatcttggaagccatggatgaatgtgcaacatcacaaaagtcggtagagattatcaggcagtacctcagggatttccgagcatccggagcttcacagccaccaggagacgacgaagcccaatctgaggcgggacaggtatttgacgtgccagtatgtattatcgtcctgttttcctaggatttgctgaccatataggaatgggcttatggtttcggtctgccagattattctttcgagggaattgctcagctatttgacgatatgggagacatcccgctggaataatgatctcatatacccgaaaacttctattctgtatatatttgcaccagtgccacctggggttttgaaatctatttgatatcctacgatcttacggactatgacgtcttcacaccggttggtttttggcaaccacagactcaacttcttttatcacaagggcagcagcgagccatcggaactaatgtgatgtcggcaattgttcattgttcattgcgacttggaatgggtttcaatcgacatgctcaccatgtgctccgaggccccggaaaaaccgagcaatcagccctctactcggaaaagccgaccgaccttccattgaagcaaatgaattccctgaatctctggatctcactgaatctccaatctctcattctcggagcctgctctcagattcgaactcctaaaactcctatcaccatcagaaggcggtgtgcgctaacggattatctatcccgccgatgtcgtctttacatccatccctagactagatggatatctcaccactatcatagaaggtcatcatgaacatcgccgatgatccactgcgtcctcgagaattagcctcattcaagtttcagccctctctcagtcgacatggcacgcgttactctcttctgcttgttcttcgactcacttgccataccgctgctgtagcatcaaatcgctgttgaatcagacgcctttaattccggaatcttctcaagttatcgagattgttgagaagaactcgattgttcttgaagggtatgcgacttggacaatctcgcctaatagagtattgaatcatgactgcgacttacctacgactaaaaaaacgtcgcctcgcaaagttcatattggagagtcttgcccgggagtttgcagcttatcaaatgactattttgatgactggccagggcttcaaccgctaacaaattccgccggtaattacctcgctgtcttcgtgcttggctggtcatatatactttctgcaagattgatagaactccgtcgaagaacaaatgaagacaaggtcgtctataccgacgagatggcaccatggaaatcaggccacgattcaaatgctagcgactactttgagttagatattgggggcgatagtgtcgctgaaatgagatggtgggctgcaattctcgcaggtggacgtggctggcaggctactcttcttcgagggactgaagcctagttcccgccatgggaataccatttgaatggcaatgatttcaggatatgtcatgatacagagttgccatattttcttgaacccccgtcttcggcagttgcacgagagtatctttacaactttgccagatgtcacgatgctttcgaccaacttatctgtgcactggctgctaccctgatgttgccaatgtatggtcggtttggtgctgccattgttttgcctaggcctatgcggaggcaagactcgcgccagcaaacggaaacactctttgccgatcaaatccctacattcgatgacatttctcggtatatggcattttcgggtacgtcaggtctacttgcctcgtgtctatttgaaggactctgggagccgggtattccttgcaatttggctagtcaatggctcgatcctgccatgaaggaaattactccggcccttttccaaaggaaacagccccttcctgttatttgggccctgtctgaaagacgccctaatctagcttcgttgtggttaggtgccacaattacaggccttttgccccaaataattctagtatctatgtgtttcatgccatcaatttacctcgaaggagtggcatggacgcaatctcctcaatcctttatggattctcctaaccatcgtcttgttaaaccctatagaaacggtcagagggtcacgatagctagagaggatgagttccgtctcttgtttttgacggacacgctatcggaaaaatatacagtcccaccactttgcccttattcaccattcggcgaggttgatatccagaacacctcccttgaagtcagacttcatcttgcttgcaaccacaggctagtatatcgttcttgggaatggcaatgtcaaaaaagggagacgttaagcgattttggaaccccaaccgattcgcaatcgctcaaaaagaatctcaagcatatttcacttctgtcaatctggattgtcacaggaattgcttgcggaagcatgttcaacaaaactctttggacatctagtttcactcatacggtaagtagaaggttgtctcacctatcgtttactacatgtcctagctaacatgggaattatagcaacgtagcagttttacctttctaggtagccttgcaacatcatgtattctaccaagatctttcaagcttgttgcatacaaacatattttgaattttcgcgcttgggcggccagggccatatcgatctttatctcgaagatacgtccacatgcgatacagcagaaggaagaaaagagtttgaatgatcggctttctaggattgctacacggaacttgttctcatggacgctgttcatcgatggaattcgaagtgaagaaaaaccactatggaaacatgactgattggaagatttgattgaaagggatcttagtgttgaatcgagtgaatgcgaagcaaaacaccagaacactgagtatattgaaaagtggctagaagatgccggtatacggagccaacctgtttatcatagccagattcgtcaacatacagatggcgcgaccgaaattcggacggttgtggtagcaattccataaacgctggttttgctctctcgccctctgacgagccgccttctttgtccaaatgctagagatcaatgctcgtgagtggatccaagttttcgtggggtcgagagtccactactcatgtttgatcggaattggtctaactgtgtatgggggtcttttcccgatggtccgttattggcattgaaaaagcgatgggactggaaaaccggatcacagccgacgacacgaatgccgcatctgtcctccgagatagaccttgttaaatcgctcactgtgtgcttgttagtcaatccaaacccacaaaggtggcccatcatctaccccaggttgccggcgaaaacttctgtgtaagactagtctattttaggaaggtttccctcaagagaaagtttcctatttaggacatcttctttactggaaaggtttctttgctggtttccctgccagggaagtttctatattaggaaagtttctataccaggaaagaaggaccatactgtaacgaagacatcctcggcaatcaaggcattccagaataatcatactgcagaactttgtagatgggacattgataaagatgggggacgactgttcgatatgcaaattaattcactccgacgatccgaagaatcacgacaatgaatacagtgttgaactcacgcttactcgctgttgggagcgaggatactatgctcttatccctggtggtcgctgcattgctctacttcttgttacaaagccttattggcatcccagaatatgaacaggcccgtcttcgagaattgtacagcgttccgcaacaacatctatttccagcaggggtgccttgcaatttgcaaagacggagcagaaacatttgtgatactctcatgtctccggcggtaagttactatgcgttttcttttgggcaagggcaacccttcatgagatgaaagctgtgactaacaagacacccagaatgtaagggctgttgtcttctgggcatcccaaagcggcactgcggaggctctggcatctcgctatgcctctgaactttcgacggcttttcccttgggggcgatgactgccaacctggcagactacgatcataaacatatgccagacgtaccgtctcaagcactcttggtgttcatcttgtcgacattcggtgacggtgaccctcctgataacggcaccgcgcttctcgagtcccttcaccagcttcgcaagcaaagtgccaacttgaacaatgttcgatatctcattttcggcttggggaattccaactatacccactttaacaaatatgcgctcgatatcgacggtatgctgaagggtatgggtgctacgaggctaggccgagttggtctgggtaacgatcgtgaaggcgccaccgaggaggattttgtggcctggaagaatgagagcatccagcaagtggccagaacattgcatctgcggcccgtggaacgagaatattcccctcgcatacaaattcgcccttggcgaggtggcaactgtgacacaaggcacggagtctcgccaaccgtttattatggcgagccacagtatgctcctcccactgctgataggagtaccaccgttgttcttcctgttatacaggcaaagcagctcatgctctccaaagaggccattggcgagtctgagagttcacgggaatgcgttcatctggaattcagccttgaagaccacccctccatcacctacgagacaggagactacctctgtatttggccggttaatccggaacaggaagtctcggcgctgctgaaagttttgggcgtttggaacacgcgcaagaatgttatcgatatcgtaccggcggacgatacctcgagctcgaacattcgaatcccaacccctacgaccatggagagtctgttccgttacttccttgacatatgcggacctgtgtctagggaactcgtccgtggtattgctgaattaacctcggatggtgatttcaaacgtcgactcgaggcactcacaagggatcgcgatgccttttacgaagaggttacgttgaagaagttgactctcgctgcagtcttacaagcggccacgacggtacgagatgaaaatggatcggcaatcaacgtagctgtgtcgtacgtcctagagaatctaaaaaagctacagcctcgcagctattccatctcgtcgtccgccgctgtggacccccgtattgcggccatcacagcactcgcagtcagtggccctcctcgtcctcctcgcgagacatcgtcgtgtccttctcatcgcttccgtgggttagccagcaattatttgttgcagcttcaaaaagaatacaaccgcagctattcaaggtcgcagcagccaacaaactactactactcaactgcagggccccgtggtctattggagggagggaaggttttcgcctatatccgccgaagtaacttcaaactgccaccagacccatcaactccgatcatcatgatcggctccggaactggcgtttcgcctttccgtgcttttgttcaggagcgcatgaaactcaagaatcaaggatgcgaagttgggaaaacagtactgctggtcggtcaccgagctccagaccaagactactactatcaggatctgtggcaagaggcgagcaaggctctagggaagaggtttgaagtgtacacggctttttcacgagtcgatacacaaccgcgccaatacgttcaagatttgttggcgaccaagtccgacctggttctcgacatattggctgctaatcaaccaaaaggtggagttatgtacatttgtgggtcgtcgctcatggcaaatggagtgaagaagtctcttgtggaaatctgctctcaaggccatctgcagtcggttgctgaaactgccgaaaagtgggttggagaacttagtcgcctcaggcgtttgcaagaggattcttggggatagggtccggtgatggatggtttagatcccatgtgcgtctcagattctgttccagagcatgatttgcccaggcattttcttgcttgcaaagtctcagaagctccagcagctccattctctccgcagggtcatgaatccatctgtggcctgtacaagttagctaggattgaatgaatataggagtagatttccgaaccgagggtgatagcaaggcacgcaatgacctttccaattggacatgtgttaaatcgagctgctccacaaagaacacggacgtggtcttggacctcactctgcaataattttggtcagaatgctactttgaatcgatgatgtgaaacagctttccagtagccacatagtcatacctccatctctttatgatgatcaatggcctgtggaccaagtgtcaagcgactcggattgtacatggcaaggaggagttgtgaaagcctgaaatgtacataacccgtcactagataaaagtaagcccatacatcaaacgagcaacagacccacttccacacttacaacaggcgttcaaagcgaatcttatttcaggcaatattctgccagtcttcaaatcagaatctgcgaagaatacgggttgaaacgctggccaagatagctctgaccattgtgtcaacattcgttgcagatcctcgaagtgttgcttgcgagactgtgcttcgtcatttccaaaacaaaagtcggcggtctctcctgctagcttctgcgatcgctttgtccacgtatagatgtcgtccgagtctccaggctcccagagatgggtcacatcaaggctggtacgagttggcttctgctgagaaatagagtggaaaacatcctgcctctggtgaacccagaatgctgacttggccaatttggtcactggttgttgcttatcacttgctatagtggcagcgaagacgtggccagccaagagatgtgactcagcgtcctgtccatcttgtcgggctatcaataaggaataagtaaaaatcgcgtttgatacgggccggaagcagattaggtcgattcggacggctacctttggactcttcatacaagcgtagaattacgactgatgcaagcccggccccatcggaaagtcggaccgggtcatgcattagcgctaaaaggatgtcaatggcctttcggtggaacaagtcggctcttccatcgttctggccggttgctttgcagtggtagaaagatgacactgctaagatagagtaacatagaacaggacagctgggggcaatccgaagaacttcaagtgtgaaatccgagtccgtgtgatcaaacctgcatcaatcattgccgctatggtcaacccaacgtaagcgctcgacatgggattatctgatagcaacccaccatggacgtcctatagattctccgaaatattgcatgagatacgcatcctcagaggtaagcagtagtggtgaggatgttgacagctcgtttccaatacgctgttctccggcctgcgggctcgtcccagggctgatgctgtggaacctatcttgatggattacgttatccgcggggagagactcgacgggagtctggggttgtgaggaccattggggcgtctccgatcggtccgaccgggttaactgctgagaaggttctaaagggggacgggcatcttggtctagccttgggctaggcagggtgcgggactgggagtcagggggcgacaaaggtgtgactggagggacccagtttctacgagttgagaaacgcacgttgaagcgccgagtacagggacgaccggctgtacggcatcgccgacacgaaggggttgcccggtcgcctgagcaatgtgcaagtccgaattagaaagtgccatccagtcgaggaactggtcagttgtgactaacaagaaatatgtcgtatgcggcaggcttgacagacagagctctgatccttaggtgaaaccatgctctcagacaagtaagcagggactgattggatcgaatagcatcaacgatgggaagctaaaggcccgggggaggggaggggcaaggcgacggagacacttaaaacttccccaactcagtaggtggaagactccagtatggattagcgagatatagtgccgatctcagaatgggagattggggatactactccgtagtagtatgtggaaaagattccacgggtagctccacggcctccacctttccttagctcagaagggaaagttgcctatttagtactagtacttggcgatgtccgagcctctgcatcactttgggatagaaaagttgccttttcgagcgggattgtcaccagctgccgattccacgatgatacgaactcccaaagaacagaagtcagatgatgattgatttgctgcatatatagcctcactaccacccgtcgtcatctggaaaacaaatatacctcgcccaccacactgaaaccgactggcatcatgttgtacatcacgttcgtcgcagtaactgttgtcttatgtcctgtggcgtatttcggcttctgcttcatcgtatacttatacgatgcaaaagcccttcgtcgattccaaaacttatcgttcctttctggcctgagtgatatacaatgggtatgggagtcgattcgcggtcggcgatataagactcttcatatggctcatcaaaatgcgacaattgttcgtgttgctccgaacgttctttcctttaatcacccaaaagctgctaccgccatttacggacacggcaccccaaccaccaaatcgcctttctacgacgctggtcatggtcatttcaagaatgtagccgacacgcgagacaaagaagaacattcccggaagcgacgacttcttgccaccggttatgctcttaccacactccttcggtgggaagacaaagtcgcgagccgtatcaatgctctcttgaaccagtacgataagttctgtctccggctagatgtcgcgagaagggcagatgctattccagtggatcatcgacggtggatggacattttcaccattgatgcgatacacgatattggcctcagtgcgaacctccgcctaatagagaaaggcgatgatttaatcgaggtccaaaactcgcgcggccagtcctaccagtgtcaattccgcaagtcgctgtgggggtgagttgctcgtccctttaagtttcttttcccctagggcgacccatttactaacatgtgtgctaggaacttgcggattcatgcctcatttgcctgggctccgcggtggtacggcttgcttaaaagactcacatggtgggattcgcgatggcaagacaacgtggccttcaatgatatcgtcgccactgcatgcaagcaccggatacagcgccatttagcaggagagaaactagatgactttttctcctttcttcttggagacaagaatggcgtaccgaacatgctgatgctaggggaaatgacagcggagtgttctgttatgctgaatgctgggagtgagaccaccggcatagctcttagcaacctcctttacttactcattgtcaacccaaatgctctcgagcgactgcggcgagaagtagacgaggcactggacggaatcgaagatacgaaagtcgcgcccttcgccagaattcgttacctgccgtatctgaaagcgtgcattgacgaggggttacgacttctgccacccagcgccaccacaactccacgatacacgccaccgtcgggtcaggacatcatgggctactggattccgggtaatactgaggtgctttgtcctacctacagcctccaaagaaatccagagatattttcgaatcccgatgtctttgaaccagagcggtggttgagtgacaacgctaaagatctgcacacatcgtttctccccttcagtgcagggccaagggcttgcattggcagaaacatcacgtacatggagcaacaaatgttgattgcatctctggtgcatcgctatacgtttgagttgattgctcctgatttcaagccagcgtatgaagaggccgttacgtgctcgccgggtcctataccgatctatctttttagacgagatgaaacttagaaactcttacgtagatggcgaatcaatacattgaatccaaattgttctggcatctcatgattttcatcgtatagcgtgatctttggggtgttgatattatgagtttggatatatagagccttttgtgacaaccacctttttgttagaaattctaaatactacctatattgatttaaataatatgcccagacagaatgtcaagataccgaaaaattcccagaaaagtagttgttcctcgtatataaaatggtaacatccagtgctttcaccactaaacgacaaaaaggcatcaaccaaatacaatccgaaaataaaaacgaagtcaaaaacaagacaatcaaagaccccaaaggtgaagccataactcggtagccgtccacaccgcgcatctctcatgaaaccaactaagccccctccaatatctataaaccgcagtctgattctctcacgaagagagtaattccatagttcacccaagcaatgagcagactgtgaaattgtcaagccaaaagaatatccagacccgccctcgacgtatcctctttccaatatcctcgcatataacaggatcacggattcggattctgcggcttattcatctcgctatccatgcgtccacagctcgtattaccacgaccatcaccgtatttcgcatacgcccgagcgaccctcggatcgacataagaattcgaagtagacgagctgcgactcagtgagcccggggatgacggggctggggatcccgaggatcccggtgtttctgcagatgcagccgccgttgctcgggctgcggcaactgcggctgcagctgcgggatggcagagcgggcagggggagacgttcaagccacaaccgttgcagctgcggcagattgtttctctgggaattgtgttagggttgggatggagatgtaaagggtgttttgtatatacctcggggcattccctgcacaacctttgcatgtgactaccttccgtcctccaacacatgatctgtgatccggatcgaggttgtacatgaagtgggtggaagtggccattgtaatggatgtagagatagaagggaatattggaaggtaaagagtgtagatgcggatagtgaagtatagtcaagatccacctgatataaattgcagatggctttgtggtattcttcccgttggtgctttctttctctctcaatggaaagcctgtcaataaagaatagccagtaattgtgagccctgaaagtgttgttgggaaaggaagacagtagttataggctaagtccaaagccagaaatgaccgagaaacaacggatatcttatacaagaagaaattaatcagtgccaccaacgaacttcccgagagtttccaagtgtcacatattcgatatgcacgacggagcgtggaatcgatgacaggaatcaggattgagtccaccagaatgatcagcaggccaaagcgagagacggtgataggacaattcgccaggtacatgatgtacgtggatattccatttacacgcatggggccattccactcaaatcctccagttattcttgaataaaaagcaaaaaaatatgatccaacatgagaggggaacgacacagaaaccgttctggacttagttgagttgtcaaacccccctgcctacgtgcttctgtcgagctaaggtagccagctgcggaaatacagggttcatgaaacaggacctggtgggggattggcgtttctcagtccacacgaccgggcctacgtcgttcatacgttttgcaaagggttcattcgatggtcattctgtgggagggtttttagcagaaaacatgtagtgaaaccaagatatcgccaaattggcaactcaacccttgatctatcgtcgggcagaccgtcgttcatgcgcggaaaagatgtcctggctcctaggagcatgactgccacctcgtgatacaaatcttgaccgctcaaactatataattatcctcccgagttggaaggttgatatggccacgagtatgggatgtgaaatgccaaccacggatagttgcattgggccatgcgatctttgggatgatgtatagatgataggggccatggatagattgtcgatgatttcttcccgtggaccttttggtcagctctcgtattccccttgtgggatgagctttctatcccaacaaatcaagtaaagtacggaataccatgcatggaagttggatcagacggtcagcagcccatataccggattcggaataggattcaaggacttctatggagtacgttcttaagacgtagctgtcgtaagcagcaaaagggaaaaggcacggtgacaatctcgtgcaaggatcaacccgatgcaatgatcttcataatccatatcccattgagaagccatggttgtaagcacaatctccgataactgtagggccgacacaaacaaatccggaaaaaggaaaaaaaaaagaaaaataactgaagctgtaaaatgaggtgaaaagagagtcctgtgagaggtgtgagccaccaataaggaacaagaagaagaactcgaaattggagtcacagccaatcgaagttcacagacagccctaagccggaagcgtggatgtgacacttagcctcaagcaggtaaccgtagaggggctgcaaggacaggggcaccgaaaaagcccagaaaccccctttaacatttccagtcaacattgcaaggattccttgcagccgtttgacttcacgtcgtcattctgaacggacctaaagcgcttctgcagattggtcacatgcagagtgagtcctgtggaaatgacacacatccatgaaaacctcgaatccactcatctcggagttttgtatgcagtctgccaccggctaaaagctcaatgtaacctaaaaatgagctcagatagaaccaacgggtatgcgcgtcattaggcgagccgcgagataccaaaaatttcagcctctgggtgatcgtactgtatggaagagagccggaaaaaagcccagcttcaaacctccatgggcttgttcaaccggttcgctgttggggaggacacctgcagccagccacttccaatcacacgctagcccaggattcgaagtccaaatttgaagtcgggctggagtcaaggtgcatgggcggcaagttgcatcaacggagaagtttccatcgatgtctcaaaggagctatctgagacttccggaggttggttgtcctggaaccagaatggttacaaatcagctttcggcaattagtgtcacgattaaagcccgaggatgccgggggcgaggaaagaaaataaaaagaaattatgaaagtcgcacgtaaagggaaaaagagcgacttggttgaagtcagctaatatgaacctgtaggatacctgcagcccagttcgcattgttgctgcaagaggtgagtctcggtcaccttttcttccatggcgtacggaaatcatgccaggcaaatgctgaccttcgaaagtgaaatgatatcacggtgcatttccaaatgaggccacccaagactacccgaaactggtacctggcaggcactgaaatgctatagcctaaagaccaggtggctcataggtttacagattacacgatgcgcagtcatgaaataaaggattgtcattctccattacgatctgcatagctatcacatgggaaagaataaggtgctacgtggcattccatcttaaagagtcgtgtgtgtagccacggtaaaaggggaaaataaagaaatagggcagaaacaaattatccagccaatgaacgccttcgtggctgccacggccacaacgcagtgatcgggtgaggatcttgcgtgcttgctcatggagccacggcataaaaacagcaaagggggagaggggggaaacaaataagcaccatgatccatccttccacgtaaagccaggacgcctgggtaattccgaaaacatcaaatcgttggaatcacgccgaaactcatgtgtcggcgttaaatcataagatatcaaagggcagagagcagagagcaaaagaaaccgaaataagggatgccgatcactggaagtattcattgggcaaggatgctagcacagcaatagttcccaggccacccagcagagcgctgatgacagccgtggtggcgtggcttgccaaggactttgaggttgagtggttagacttgattcgctttgccggacgctcattctcagcaaatgcagagacattctcagcaagtgcggagctgatcgcatccttggcttcagaggaaattgtgttgaggtcgagatccgactggctggttggctctacaggcaatcgctgagcatcttgagaaatactggcttcaagagccgatgattccatctctgttgcagtacgcttcaaatgtggttttctaaatgttgccaggcaggcatcttccgcgggatagccggtcgagaatggtccatcgtgatagggatgtttgaattcatgggacaaggacggtaccccaacaaagctctcgatcttccgttgcattggtgggtatttgttctgacatgaacttggcagctcaccggaaacagtgtgtgtcgggaaccgagcacctgggtttgtcataccaggagcagcttgtcccatcaatggtttgctctcgatacgtgcggggttcagtgactggccctcaaacggctttgcagatacatgctcgggcacttcgacagcatcagtgttgttggcacgttcaagtttcttcacaagctccggaccaagcaaggaacggatatcaggattttgtggaatatggtgttcaaggcacccattgtcagagcaatcagagtcgttttcggattcatcacagatctcgccatcttcttcaaagtcctcggcataatcttcctcaaagtcttcttcctcgaggtcgtccgacatttcacagccgtctccgtgaatcgagtcgctgtcgtacatgagacatggatatctggggtagctctccgaggaatcactaagagcatccgacttagttgtgtattcctcgtattcttgagcttcttcgtctgaatcaaccgactggtcatcagagagccagttttcatcgaaattcggatcccagtaaggagccacatcgcaccatcgatctccgatcattcggggctcccaggccctcacgatccagcacttgtgacagtcttcaacctcggtctcagtctccagctcgcgcttcaggtcttcgctgagaagctccagtggcttttcaacgatccaccaccgattgctcacccgctcgccgccttcatcttcgttgatgacccaatatcttcgcttatcgactgaccagtaccgaagaaggttgccgggcatacgatggaacgatgtgtctgagtcctcggagtcaggctcccagtagacttctgtcccaacgcaaggtcggaagctaggggtatcatctacccagtacgaatcttgggaaatagaacaacggcgcgccgcgtgaatgatgtgcctgtcgtggtcaacgtccggtatgttgttggattcaccccaagccatgtctgccaggcgcatgaacataggtcgcatcatggtccaatcgctgtaacgaatttcaggtacttgctggtaacagattgcagggaggctatcttcatgtgcttgttgttcagatgcaatttcagcagaggccgactcagcgagatatatcttggcatctgagaccagtttggcgggagatgggttggtgtcggagaccggtttggtatcagacagttggccaagaagacccgggaccagtggggtagggtcgggcacaatcttggagataggctccttggtagcaaacacagttccccaaaaggagttgcacccgtcctttgaatgttcgtcgctctggacactctggacactcgaggcaggagaaactagagatgtattcataggctgcagaacagtagtttcccaagatcgagcaacggactccttagaagagtcatcactgggtaggtcggtgtcctccatatcgctatcgtcttcggggacagagaaactgttggttgacggacttggatccggtttgatagaaatactatcgtctggaatgaccacatgctggggtttgagccactcaaccttgcagctgacttcgatgggctcaaaaacttctgtactcgattagttccagtgctattagacttagattgctaacttgccttggccacggtcaacatcgacaccgaatcggatgatgtctccgttgcgcagcggggtattcacgtctgtcaccagctttccaccattcaggaaagtcccgtgtgttgagccacagtcggtgatgaaaaccatctacaagggaggtcagcggggtgatctggtcagaattgggggatcaacacaacattttggtttggtagtatcttaagcaaagcatggtcacgagacatgacctgagactcaaaccaagcgttctctgctgtaggattgcggtttcgattttcacgctttgaggcacgcccgataggcacggtcttatcattgtcggtgatggtaagggtacgcagagggtagaggtcttcgaagagggggacaagcgtcacggtggctgtgaattagacatgtcagttgcaagtaaggtggcaattagggcatccaagtacttaccgcttgggtccgacatggtgaaagatagatgaacgatggtaggatttgaaaggcaggaataggatgctgtttgtttctagataatggttagactgagagatagaattccatatatgataagagcgaccatgacagcaaggtagagtgagtcacagagtatcggaagatgaaggggggtgcagaaggttaagggagttggagacaaaggcagcttacccgggtggttccaggctgcaacacgatcacatggaccagttgagacagccaggagatatcaggtgtattgcagaaaagtagattgcaagtagagcgactaggagcagcgaatataaagagttgttcaaagcacagaaggtgaggaaggataagggaaggaagaggggtaggttcgtgaatcaggtagtagttaggttcaccgctgacaacgcggacaacgcgggccttgaggagtagcgactccctttggaatgggactcaacttggttctcagttactggtaagtctattcaaattcgaagaaagtcaggattcaacacgaaactaagaagtaaggtatccggaagctcaggaacaatgaggtatgtatgagaagtgatagtataagataagcgaatgacgccgttggacttatttcgatgcctcggctcgacaacacttccctattggacacagactggctaactaaagaaagtatatctcaacctacgtactgagacttttcgctatttagttacttcctttttcgttgagacacagaagaacaacagagtccggagatgccgataaggggtggggtcagctgatgtggagacacacgtcatggtcatccgcacactagggggaactatgtatacgatgcaaaccatgtaaggaggatttcagagtcagtgagagcttttgaagtgtattgtaggtctgatgttaatgagcactatcattttcctctatggtacacaaattactacatggtcagaccccaatgcacttccccgggctcggtctgccgtccatcggcctatctcatcccgagtcttatctcagacagaccaagtatcaaaacaaaaagaaacgaaagaaggcggacggggaatatgtcaaccggtagtaaatacatgcggggagaatagtgaaccggggatccaaagaaaaaggcttagacaggaatacccaaaccggggcaaagaaagacgcgaagaaacgaagagtgaggagggtccgctgacttgcttacattccaggagcaccaccgttcacggcacccatggagttcaggcgggcagcgagctgggggtacttctcctgaacctccaactgggtgcgggtggcctcagcgtaggagatggcgttgatgatctcggcctcggtgcgagccagctcagcagcgcgctcgaagtacttgagagcctgggagaccttaccctgctggaggagaagctgggccatggttccgacagcaatgtcgcactcgggatcaatgatgagagccttctggcagaggttctcggcctcctggaagtcgtgcttccactggaacaaagcaagagccttgttgatcaggggcaggacgttgatacccatgggcttgctctgcgtctccatctcaacagccttgtcaaacttctcaatggcctcggagtagttctgctggtcaagcagaagctcgccgtagtagttgtatacatcagggacttcctcgaagttctttactgtgcggcggaaagtggccatcgccgaggcgacggagcccatcttgtattgtgtgacaccgagctggatgtgagagtaaatgaacgaacggtcgaggtcgatcgacttctggtagtccttggcggcttcggcgagctcggtcaggatgaagtgtagctgggcacggtggtagtagatatcggggtcgtccttgttgtgagtaatggcaagctcaaagtcatcggccgcagcgtccttgttaccaagctccaggtgcaagctggcgcgcttgatgtagctctggaccaaggaaggtgacagctcgacactcttgtccaggtcggccaaagcgccggtggcgttaccgccgaggtaggtgaaggtggcgcgcatgttcagagccaatccttcaaattcgtcgagctcgccgagctcaagtgccttctcgaaagcggcggcagcctcttcgtagccatcggcagtcttcttgcccatagcgacaagacccttgcgcagctggcccttaccggactcctcgctcaactcaatcgactcatccaatccctcgggcaagggctggggacggaagctctggaggtagttggagacaaaagtagcactaggcaacttcttagtgcgcgcctccagaatggcctggctcttcttctcggcaaccttcttcagcaagcgttcaagcgagttgcggctcacgtcgttggagaaggcatcaatgatacagctggctgtgaagtcgaggagagcctcactgtacttttcaaggtgctcatacgcaatggctcttcggttgagggccttaatgtattcgctgtccatggcgagagcggcgctggtgtcctcgacgaccttctcccagttggactggacattgtagcatgcggcgcggttggagtagaagacggggtcgggcttgcagataatagccttgccgtacaattcaatcgcgctggggtaatccttgattccgtaggccttgttaccggcagccttgagcttggccgcatacgcgttccgggtcttgacttgtcagagaaagtgtgggaaagaatatggcttaacatacctcttcagacagctctccaatagtggcctcatcgacttcgggaagctcctcgacaggctcctctgcctttttgacagactctggaatctggtcagtcatacgaccaccgtgtttgaacaagaacacctaccatcctgcacggatgcagccttttgctcctccgcctttttcttttcctttcgtcgctgatttttgctcttcttgggtgctgagggagtgggtttgcggggatcgttcaggtaatagacaacacccgctccggtcacgacaacggcaacaccggcaatggtgtaaacaacggccttgttctctgagacccagctggtgatgcgatcccagactgatgccgatgatgactcagtcagctttgatgtatcgagcaccacattttgggcgggcgtaggtagcggcagttcgttcgacatgatgtgcaaagcaaagggaccgacgcgactagttctaaatgtgggcagatgtcagtactcaatccaatgtttggcgcaattagactgagatggaagacaaaggggtcacttaccagacctcgacagtaggagttagagatggggaagttcgggaatgatgaagctcagaggaaaagtcaagggttccgctgaccgggtcggccaatcacgcgcactgcgccggtaacactccacaaaacatatccggattaaacagagtcggctcatcaggtttcttatctcttatactcttccctttttgtccttcgaattgcatccgaagtaacatctgtgaattcatttcctatttggcaacactgacctggcgaccacagtaacgacgttacgccattgactgtcgcaaaaatgaccgagaactcctcaagcccagaatcattcgagatcttttcttcccttcgctttgacccaagccttccagacgcagcctgtcgccatgcatcgagctatcccgatcctcaaaaatccccctactacctcctcgcctatcaccaagaccggctcacagccgcagcggctcatttccaatgggacgaggctctaaactggctgcagcaagacctgcaagacttcgaggcgtttctcgacgcgtcaatttcggacctaagcaaggcgtggagactccgaattgtagtgaacagtaaggggaaggcgagagttgagacgaacccaacagcgagcattgatctaatgagtttgttcattccctctctacatacccacccaagcgaaccaatatggcacgtccatgtcgatacgcaatcaacaactccttcaggtttcaccacacataaaaccaccgcgcgggatgactacacgtctgcgcgccagagggcgggaattaattccccgacagaccttgccgaagtactggttgtgaacccggatggcgaggttatggaaggcagcatcactacgccgtacttcttgcgggaccatatgtggatcacgcctccgctcagcagtgggggcaatgcaggtacaacacggaggtatgcgttatctcagggtttctgtttagaacacaccatttcccgagatgagcttgtggatggagaggagtgttggttgagcaacggcgtaagggggttcatccgaggggtcatagtcaaataagaatttcccatacttagtatatcttcgataggtatactccgtatatgtggacgagtcgatacttgaatggtattgataaattgatcaaaaggctatgaaatcatccgtatttttgaacatgattgctccagaaaatgctccatcacaggtctatttcttagccttctcaatcaccactgggttgggattccccttccactccaagggacgaggacgcatgtactcggccataatctcgtccgtaacctgtgctctgcgctcctggaacccttgaacatacttctgaagctcagcgatacacttctgcttgatctcgccggtcatcatcttgccaccctcgtaatcggcacggatgcgctccagctcctcgtcgtcctcgaggaagaatgtcaagtactggaatgggatatcgtttttggtgttgccgcccagctcgcgctgcaactccgcggtgtcctgaccacctgagaaagcgtgcttgttgatcttgttcttgatcttgttaggcgtgtcgctcatgaaaatggcggaactgtcgacactggcggacatcttagatccaggtccctgaagggcgggaaggaagatagagtgaatgagagagggcttcttgtacttcatcttctctgcgtgttcgcgacattggcggaagtaggggtcctggtcaatggcgcatggaatcaaacaaggaatcgatgccaccttcttcgtctcggtgccgaagatgtgggggaaactggtagagaaggcggcggcggactgggtggcacagaagtggaactcgccaatgttgttgctgtcgttaaacccaaatgtgcccttgacctggttgattgtaattctcttggccatgcggcacatgttctcgtagaaagcaccaccaataaattcgaaatcactgaagataaaggtctttttcatatcgaatccaacagcaatgatatccttggcgtttgcttttgtgtatctcttggagtcctcaatctcgatcttctgggagtgcataaacttctcgtcgtcggtcatcatgataacgaggggaacatcgaagacgtcctggagccatctacatttggattagttctagtaatgtcccggtgatcgagactaaacatacttggtgaactcgaacggcacagtgtgtccgacgtgcatgctatcactactcggcccacggccagtgtagaggaagaatggctcgcccttctcatgcttatccaaaatcttcgacagatcacggtgactgaacacaatactccggcgcatgaaacggtgtggccggtggccagtcactttctcgaagcgctccaatagagctgcattgatgggtgtggctccaaactccctcgtgagcttctcgtaatcgaccggcaacagcttgccggattcatcgaccccaccggagacatcgaagggcgtaacgatctggccaacggccttggtctctggggttttctcgtcgatgctcaaggagttgagcgccggaggctggattgcttcgttggccatagttacttcttcgtctggtacaaattgtcagttccaggtgttcaattgtatcagtcaaaggccggttctcactttattttcggttgagagaatcgtgaatttcttctgcccctctccaatatcgcgggatgagtcaggattcccgctatcagtgggcactctgattggtcgatttgatacattatcaggtgaccagtcctagccccgcgaaagcctttctttgtgattgttattgtgtttgttattgctgtcttgataaattgattttgagttgataaaagtgtgagactctctattacattaggtcggcatctctgttgtctttgcattgcattcaaagtttatatctggaaacagagtgcatcaagaccgatccggcggaagtatatactaagacactcactcctccaaggccactagtacttctttttataaactgcagaaaaaatagattaaaccaaatttaactcatccctatgtccatagtatagacgcttctcaggccccccacgatagtaacgagttgaagaaattcggcttctacctactaatgtaggaaaggtggccataggacgtaaaggtcgcattatcctatccaaaaagccagcgaaggagttctcaacagcattagcaataaaggctaaattatacgaggcaggttctcataaacgcctgcctgtaccaggtaaccttaactcaagtactatagggatttagactaactactcaaactcccagagaatagttagtcacattttatcgtggaccttctaacttagtattaagacacaccagattcccaagacaattaatgaacagcccgaagacatcttgatgacgtccatcttccagcgccgatcatatgtcttaagatcaacattccttcccacaagttagtaagagacacattccacagagaaacaccggccatcacttgacgaacatcggaatgcagtttttactttggaacagcacaggatccagacttggcagccccctgcctatcatgcaccgatctagaatccctgcccaaagctattgtagtctatatgctttcatgacatgtatctcgcgtataatgtatgtgttggctacaacagcgaatatatagctcgtctttttctcgcatgcagtgcggacattgtatttatggctgtttcgatagacgcggaagacgagcctggatgtataatatgtagtgcagtttcgtattgaagctgaggcttctactattcctctagctatggctggtatcgatggcatgtgtcaattctatattcaaagaaacaatcataaataatgtcggagatacgtatggctggttccttaaacacaaccactcgatcatatttgtctatatactcggaatcgtcttctgctttaggaaatcaactatcatcaaatgaagcggatgccacccaaatcccccacctacacttctacctatgcccaagatggggcaaatgttggatccacatgcgctagcgtggctaggcactttatgagatcccactgttgtgggatctatctcagaacggtatccatcttcgaaaaaaaaaaaccgacggtctagagccaacgtcattcaaggatcacgatgatttctctcccgtgaaatgagacactctactaggacaccccggcttcccgcataccgtcagcccaacagtctcagtcaaagtgatagagatgcgctgtactctactccgtactcagtataccagcccactttcctagctcccaataagcacctactccatcccaccaaccactacccaccttgccccgtggatgcgcggggttaccacccctcgacccgagactccatgcagcaagccgccgctaagaacgccttattcgacgggcctgcaagccactactccgtatatccgacccccttacgccggactatcgagtatatctccaaatgcgtaaaccgacggaccacaccccgtatgattggtgacatccgtcggttaatagcctaggataacgaagtagactttggcgggtgtgtcactcatgtttgagattctgccggtaagcttgtgttttcggtctgctgcagatgttggtggcttttttgataatcgcacgttattgatggttttggttgagggagaaggactgggatttgatatcggctttttggaactgtgggaactccgaaggggtccggttgacacgtagcttttgtcgtgttctgtgggaagggatccccgcttgctttgttggctgtatatattttgtgatattttgctcagtctcggcgttctttgttttatgctggggttggtttcactgcgtcggattattcccgtggtgggggtgaagtgccgaggctatggtcttataaattgtttttggactggacttggattttaattttgactatgggctcctcgatactctgttgtaggtttcaaactcctcttgtagtacagagtacagcaggaaggtgcaagagtatgcaggggcaaagggcaccactgccgaaacttactgcaacctcgatttacgttctagtaggaatggtagaaatacttactattatctatatattattcgccactgcgattttcagggactctcagtgggtgaggtgaagaagatcagctctagatttgcacctgggcaaaatacgcgatagtatgaaaccaaagccagcccagtatgcagctagctcaatcgggactaatgtgtaggttgcctttgcttttgtacctttattattagctcatatttgactctaacgggtcatcgtatcgtttagatgttactttgtctaggggatgatggtccaacacgaagataagacaaatacctcatttgaatataagatttaacctttctaaataaaggtctgcaattatacagcttttaaccaaatgcgccactgctcaagagatagctggatggttggaggcttggacgggaatgcaagacatgctcacaccgcaggccatcatgagattgtatcaagcacctagaacaagttcaagggagattcagcctattgcgccagccagtcagcgtcaacggtttcctccctacacgcgtaatgataggtgtcgggtgatgcggcggagcaaggcaacacggatggtggttggctggatagaatctcctatccagctcagggatagattagcttcagcagaggaagtagacggatgacatgactgggtaaatcactgtttagttgggagttagtcgggacgtcactgtgttgagttaggagcgtgcgaatcagaaatgaccaacttgacgcatgacaccccggtcaatcaccgactggacggggatcttgatcttttttgtttgttttgggcgtccattcccgctatatctaaacttgattatctccatttgtgatatgaagaagtgaattttttgtcttttttgaagtctagcccttgggaagagctgggtcaccgggcggctgcgcgtggagagcgatgtactcggtaccttgtgagatattggtttcacaggtgcctggcctgaagcttttaagaaggacgattcctagttcctgtctcctttctctctcactcgtcttgaagagattgaacatattagggcaaaggagttccctgcagtcccactattaaaagcggcaccttcgtcatcccgtccccccaatcttccaagaagaaaaagaaaagtctggatgtgagggcatcggagtcctcggactcgtctaagtacgcgatttctatttttttggtctcgtttcattggatttcccagtttgtgcctccttttctgtattttgtcgtcattggcaatttcttttgttctattcttgactctttggtggagtttccccccgcaagtgcttcatgcacactaaccgggaaaaaacaattagatgcaacattctccctcggattccccttttacgttttccttctcttcttcttcttcttcttcttcttccatctacctctcgtctcgtaatagttcatttacaccaagtaagtggctcaattccaggcttttgtctttttcctagcctatacctcgggttcgatatttcttctatgactcgtaaaacatattctgtcggctatcgcgatacgccttgcattcttcgctcaacacatgtggcattctcatactaacccaaatctccaggcctatcatcggcctcgtatcgacgctccgcattccaaccaagagatcatcttgaaagtctgatcacgaaacacggctaccccacacctgtgtcactctcctctctgcgagatctgacggccacttcgtctacttatactcccccttcgcctcggcccagttacccggatcccagtccgatcgacacttttgactcatttactttatcatccacacgacccattcctatcccaagacgccccggtccattatacgaggatcttccagtgacaccactcacgggtcgattcgatcacgaatcttattttgacgattgggaacgtgcgtctcagtccgccaagtcccgacaaatacttccaatccggcctgtccgtcggtatccatcgcggccgctgccatcctcagcaataatgcgtgctgataactcaccttactactcccctgctgcctcacctatcatgtccccacggcgctcaaactctccgcagccaactcgctgtcgtgcccagaacccttccaaagtgaagcaaacccagaacttccacctcggcagcctgccccggttccatcctgccgtatatcagtcgagcagcacttctcacaacgctacagcgcagcctccatctcctcaccagtctcggcagtccacctaccgcactgcagccgggtcacgcgacatgatgtggcagtaccgtgaatacatcgagggcgtccaccaaggtccttcggcgccccgtttggatcctctggttagtccgggtcccgtcacgcccctggcgctagaggcgggtgattatctcgcccatggctccatgaacaacacatccgagcggatcccgcgagatgtcccgaagaactccggccctccggctgagctggtggagaagctcattgcctatgaggagatggcccgacagatggcgcgaaagtccgccaagggccgatagtagactgtcccaccctggctctgcatcaaaatgtttttgtttattatccattagagaaatgggaaccccccgaggttcttcctgcctgttcattttatatctgttttattggtattcgggaacaaatgagctcactccaggctgatacagtgtgcatgggtcttttggttttcatctcttttttcatctcctttttgttatctcgtcattcttacccctcatggtcaaacttcctcggcgtcggccgactactgtgtttgatcttgcatcacggcatcatgtatctaaattataccccgctctagtccagtctcggaccttggcacatccaagtttcaaccttcaatatcaaacatattattcatcctcctttgtttgaccacaccaccgtggcagctaccaacctggcgccgtaacgtgtccttccaaaattaattgttacggtcgtaagccaagtcccctgaggcgtagtggacatgctagtttgacacttggaggtgtctgttagatcatatccgcttcacttgcagcccgccagggcagccgtgtagcccatctggagtgcctttctaatctccagtaatctctagtaatctagacaatgaatttttatcatgcctttttttttgatcttgtacgactttcacccggcttcccaccaagtcgcttcgagatcagcagtcccgataacccaaatcttacagggatgatatgcagaccttcaaagctaatccccagatttactactcccattagggctagctcaaactgtagctcgaaatctccaattcacgcctaaggcatcacccgcgattcggaggaacactcactctccccgagaggagtctgcggggcccaagcgattatcataccgactcccctcgttaatattttcctcaattacctcattgcagttcatatatataccccagcttccccagacaagacgcgccggcttgcaaaaaccctccttggcagctcagcaaccccaaaccactctatccttatcagcatcgtcatcacatttccaaggttcgcttttaccgcccacgcgttgcgcacgagcaccccacgagtccagcaggcgtcatttccgtgacgcattggatcgccagatccaggatcggagattggggaaattgggatcgagattcgattcttggacgatgtcatcgacgccggcgcctttacctgtttcggagatgacgagccaacagaaggagaacgcgcttgctcagtctgggacatcgaagtcgaattacaagggctttgtggcgggtgttttttcgggaattgcgaagcttagtggtaggttcaagtgttctgtggtttgagttggggttgaagctaatttttgtttttttagttggccatccgtatgcagaactgaactaaccccttcgccttgggtcaattgttaacgaaatcgcacagattcgataccgtcaaggttcgcctgcaaactagcaaagatgtgcagttcaagggaccgttggattgcacgttgcagactttgcgaaaggaagggttacaagggttttacaagggagctacgccgccgctggtcggatggatgatgatggactctatgtgggtgttccgcggtatcaagaggaataataggaataatgctgactgtctgcagcatgctgggctccttgactctgtatcgccgattactactcgagaatgtcttctcgaaacctcacctccgctcttacctccccttctcgcgctaccagccagacctcgcaactctccctagcttcggacatggcattgcaggtatcatggccggtacaacggtcagcttcatcgcagcccccgtcgagcacatcaaggcacgtctgcaagtgcaatacgccgccgacaaatcgcagcgcatgtacagcgggccgatcgactgcctgcgcaagatggtgagtgccaatgactacattacatatacacccaccgactaacatggacaggttcgcacgcacggcatccgcggcctctaccgcggcctctgggcgacaatcttcttccgctcgtttttcttcttctggtggggctcctatgacgtcctgactcgctacttcaaagagaacaccaagttgtccgcccctgcggtcaatttctgggccggtggtatctccgctcaatgcttctggctcacttcttacccgtccgatgtcgtgaagcagcgaatcatgaccgatcccatgggtggtgcgctgaatgacggcaagcgacagttccgcggctggaaggacgctgcgatcgccgtatggcgcgagcgtgggtggagagggtactggcggggcttcgtgccatgcttccttagggcgttcccggcgaatgctatggctctggttgcgttcgaagccgtgatgcggaccttgccctaactccttcacggtctacggagaacacgaacccaaaatgattacatatagaactttcatggctagataataaattagatgaacatacccgttgtttatgcatgatttgtctccgatgaagttaatctcggcttggggtagtccgcgatcaggaatgtgtgctctgtagcgatgagccgcattcggcgatgagactcttcggggccctccttgaagcatcccgagatagcacggagatactccagggtctaagcgaatcccaattcgtaattgggccatgcagctgggattgtgagctcggccgccgaagggtcctcgatagtgaggtgacatgggttgtcttggtgctgtctcgttccggacaaggcaaagaataaaacttatacattatccatagctgttctctttaaaacttacactctctttcacgtcaacattatttcccgtagtcgtcagcaggggaggaattgaggcaaattgaatctggttccttagtgcctgaggcagtcccgcagtccacgtcaacggtttcaccagacagcgacaacgcctcaaatctccaatttaacgaattaacgctgatcggccatggccgttgcacgctccatgcgccgcacgagcccaatcggcctcgtgctagcagcgctgctagcatttggcttcatatgcttcatgctctcgccctcaactccctccgcaacctccgcatccgccagctcccaacagcgccaggaaaacgccgccgaacaccccctctccccgccgaccaaacccttcttcaaatctcaagccgtccgcagcgatggcttcaaggccgccccgccggtcgtgcactacgacctcaacagcctaaccagcaccgcggactccatcgccaacggcgagcggatcctcatcctcaccccgctagcccgcttctaccaaggctactgggacaacctcgagaagctgagctacccgcacgagctgatctcgctgggcttcatcgcgccgaagacaagcgacggcaacgccgcagtcgcggctctggaaaaagcaattgccaagacgcagtcggggccaatcgacaaccgcttcgcaagcatcagcatcctgcgccaagacttcgacccgccgttgaaatcccaggacgagaaggcccgccatgcaatggccgcgcagaaggagcgccgcgagtccatgagtcgcgcgaggaacagtctcgtcttcacgacgctcggccctgcgacctcgtgggtgctttggttagacagtgacgtcgtcgagacgcctaataccctcattcaggatctgacggcgttcaatcagcccgttatcgtgccgaattgcttccagcgctactacgattccacgaagaagagttgggatgtcaggccttatgacttcaattcttgggttgatagccagattgcgcagaacctcgctgcgaatatggggcccgatgagatcctcttggagggctacgcggagatgccgacgtatcgtaccctgatggcgtacttgccagatatgaaaaatctggatccgaagaggatgcttgctcttgacggtgtgggcggtacggccctgatggtcaaggctgacgtgcatcgtgacggggccatgttccctgccttcccgttcttccatcttgtagagacggagggcttcgcgaagatggctcgaagactgggatatgaggtcattggactcccggattacttcgtatgtttcgtctaatctgcatttgcagagatggggacaatcttgctaacatgctttttctttttttttgcaggtctaccattataacgagtaaatggttgacagcctcgtttaacgtctatttcacttgcatacactgcgctgtgcgcgtctcgacgcctttctcgtctctctgggccattcgagagattcattagcaacattcagctccgtgtccgtctctctgttgagggggtttatttcatacgtgcttgggatggttgtttccccaggtctcaaaattgactttgcattattctgtgtattaccaaggaatatgagtgggtatctatttatgttggagaggagttagctccaaggaccaagggcgttgctggcttgatgattcttgtgcatttattttggctctaacatggctatctccatgttcaatgaacgttacttattcgtgcaagattgaatttaaatgaatcatattagagacataaaaagcaccatagtatctagtagcaaggcgttggtctatttataactcgtcacttatgtatccttttcaacgagccagaggtatgaacttttgtcgtgccaaggctaacagtgctgggcacagtatgatattaccggtgtataccagcatataccaatgtccgatacaacaatcaatcccaagaaatactataaagcgtgtcagtgatattgtgcctggaaagcatggcggggcgaatggatacttacgcaagcataataccggctccaagagcaacagccaagaactgcgtgatagtcttccgcacctcaacgcccttatccttgccagtctccagcaactccggaatcacagccacggtgccaacatacaagaatgtgcccgccgtgaacggaagaagcatatcaccccaagtaaggctagttcccagaagaccagcagacttgctatcatccaacatagtgccattgccaccgaattcctggacagcgattccaataaaagtgcccaagaacgcaccaatagcggtcacgaattgcgcgcccatggccttgcgcttcgagaagccagactgaatcagcagagcaaagtcaccgacttcatgggggatttcgtggaagaagacagccacagtggtcgtcgcgccgatagtaggtgaggcatagaaagaagaggaaagagcaaggccatcagtgatgttatgggtgaagtcagcgatgagattcaggtaaccgccaagcttgacgctggggttgatttctttctcgggaacgacctcagcggactccttggcagcagacttgcgcttcttcagctcgccgctggtcttcttgctgtcagctccggatgtaactgcatcgactggttctgtgtgcgcgtggctgtgcgagtggtcatgaccgccctcgccgccagtggcgatgcgcagggttttgtccattgccacgaaggtgaagaatccgaccatgattcccagacccagaaggaggttcttgtttggctcgaccattacgaagctcacgtggtcgggggaggcttcgccgacaaagatctcggggagtaggtggaagagggtgtcgccaagtaagccgccgacggcaaatgcaaccatcactgacagagaggaggggtcgatgttgggtgggcatagtgccaggaggaagtctagagcagttagcagaggcatatcacgagtaccgagggaatacttactaggtgggccggagatatacaaagttgccagaagcgcgttcacggctggggtgctcgggaagaggacagcaaagatcttcgctgtcaagctagtggactctggacgagttgcacgcttgtgctcattgagagactcgactagtgggcagctctgtggcaggtcagtttacatgtaggacacacagtacttgtacagcatacctgcaattgctcctcgatctgacccacggagagccctccgggaccaacattagctgcagctaaggctgagaacaaaaagcatcctgcaagaagggcaatgcctgtcctgcgtgatggaaaaaagcgagaagccattgcgaatgaattggccagggtgctgtaaagtgacaagcaatactccgtatacccacggaagtagaatccccgtggacagctgagccgctatcgttgtttatcgcgggacactgagcaaacatgccaagccttgcaaactcggaaaaaaagtttcgataacgcttttttattatcgccgactccagcgaagaagaaccaattcgacctccacactcacttcacaattcacaatgggtaaacttttgcagaagaagaaggcccgctccgggcgctccatggcccgggccaaggacagccgtctcaagagcggccacaagaagatcaatgtgctgggaaatcagatcatcgccgacaactggtatgcacattttgctcaacttgaaaaatacaaaagctaacaactgtagggatcgtggtctgaccctgacacaaaattaccagcgccttggtttgatgcacaagctgaacgcaccatctggtggccgcgaacgccttcccggaaacgaggaccaataccccgagaacaagaactcgctgcacatccgcggcagcgccaaagcagccgcagccaagctcgacctcggcgagacacgagtcgagcgcgatcccgagaccggcaagattctgcgtgtcatccacgacgacgaagacaacatccaagtggcgggcctcctgcgctcgcgcaacaaccctctcaacgaccctctgaacgacatattgggaagcaagggcgagagcaatcctctcgcagactcggtgattgtgcaacaactcgagcgccaggccgatcaggagggcaagactgtccgtgctaagaagccgcggtaccaaagctcgcgcgagggcgagtgggctcagcgcttgattgagaagcacggggataattacactgctatgactcgtgaccgcaaactgaaccctatgcagcagagcgagggtgatttgcggaggagacttaacaagtggaagaagagtcagtcgtaatgccttcatttgttcagagcatctggttagggcgagtctggcgtttatatttttttgtttatcaaaagtgtctacgtggatgcaatgcgtcccgaagtaaatattattggacggcgactgagccgcttggattcgttatactgttcctttagttgttactgctgagcgtcgagtaggtgacacccccggccggcgggaggcttattcgttgcaccactcgtacccatcgtcggcgtctccattctcccactccgtaggatgcagtcccttcctcccaatcccgttgcgtcttctcctgctccttgcccttggtttccttgggagatggtgggtcatgtaggtctccgtaggctgacgtcaaatcgtcccctggttcttgccgaggcgggggcaagtcccaaacccaaccaccgacttctccgacaatggcattgccttccgcattcacgcctgggacctcgaatccaacactagtgatcatgcgctccaagacccattcacggcagtctaggtcgagttcccacttcttgctcttccaagcccagccacgcggggcacggacatcctcaaagaatcggcatccacgagggcggtccccggcaatgcgagatggtgatagcgggtcgtatggcgcgtggctgaagaggaagctctcccacccagactctgacgttcctgcggcccggtgctgcagctcaaaaatttccacctcccgctcctcgggatatgtgtccaaggagatatctgcgagtttttccatagccgacatcactgcggatgggtttgtagagaccgatgagccgaacccatcattcttgtccgattctttgtctgaggaatttccattcatatcttgcatcaaactccagaggaagtgtcccaccgttgggtggatggaaagaaccagtgcattgccgcaaagaagcagcacaagcttaaggggcagcagatgcgcactgatgaacaatactactatagcaattgtgcatccgagaaatagagttgaagagagcttctcgttggagaaattcgtcagcggcgcaaagacagagagggcagcatcgtgggcgtctgagaaatcagccatgcaattctgtagatcccgcatgttccgaaggaagtctttggaagtctctggtgctggcttaatagtcgtggctggtgccagcgctggcccatcataggagtagtaaggagtagtgatggacgtcgaggtgcttggaggtggtggatgacgagtcgcaaaggacggcaccattataaacagtaagataatcactagaggcaaaacgaaaaggagatggggttctaagcagaggaaagagtagacaaaaaggaaggagattgtatgacttggtgtgtcccaggtgaatagttgctcaacacggctctggaacagaaataccacaccgattctatagtagttttagcctcggtaggatatcacatgggacgattcgattctaccttgcattgaaacggcggaaattgtttgccattacaggcaaactaaaagccggtttctgaggagaggcaaagaccttgtctcccgctgaatcattttcatcctcatcgtccgttgggatgacttgttggagaagcctgcgatcgtcagctggaacacggatctatcggatttacccaggagcaaacccattccaaacatactttgtaaataggcggtcttgcagtgagttcttggatagagaggaagacctcgaatgcgagctatctggcgaacccggtctattccgttttgtgggcttgggcatgtcgctcagtgcttctgtaaatccatccatgactagacatgggattctacaggaagaagagaggaggtgaaaagggaagagaagtagttagtcctccgtactccgtagagagtcggcaattatacgatcagccccaagcacatgctttgccgggaaagaggctgacataatcccgtgtgtatcaggggaacctcgaggtacgatagttcacgaagaagaacaagttggtctcattgattctttcttgtacttgattttttttcagatatacatgtgttttatatgtgattcttcacatcccacttcgatttcatccaaaattctctttgtggaccaggtgccctataaaatccaccttcccccccaactttttccctctagttaccgccctagtggacttgccccagcaaccctgcttccccccaaaattatttatcaaagagaacctcctggcccttattgctctttcacaactcgcaatggaacggtaactgttttcaagagtcgcgcgacggtgctcaagtatctcctggttgagacctcgcacttctcctgaatgcaattgcgatcgcctctctggcacggtccagtctccttttccgactttacttgagagacgcgggagcttaaacaatgccaacaaagccgcaaacactggggaggggtcaagtacggaccgaagcacaatcacacaatccctcacatgatgattcgggctccggaggtaagagttgagatgtcgggaaggtgcagctagatactaacaagaaatagcagaggctccggcccgcaggctcctgcagaagtcggcttccacgcacttcccctcgaatacccattttgacacatcgaatggggtcgctggtccgcgcacgggtgggataaataggagaagactgtcaattcgtgatagggttcctcagggcccacggccacaagatagttcccgatggaggtatgtctagttctgctctcgtaattgactcctgaactaatttgatatctagcaaacctagtccataccttcattctaatacctcgtctgtcgattcgacgatggattcgaccaaaagcttcaaccttcgatctacgagcgtgggcaacctggcaaaggctgattccaatcatgcagacaacatggacttactagcgccggtcaactttgatgatttccataacagcatcatgggtgagcctagcctgaacaactttcccatgcccgcgagcagttcgggtgagaatcgtgaaacaggtcctccggcaaacccctgggaaagccacacgtacgcggccaacgtatcggaacgtgcacggggtgcttccgctcgacgaaagagtgaggtgcaacgtccgaatggtccgaatgctgcggcagggctcacggcgtcctcggccaacacccgcgcccgccgccagagtatagcccagccgtctgccggagctgctccaaggggtccgcgcaaatctatcagctctggggcatttgcgcctaccaatgcttcggccagacgcgccagcctaagtgcccgcaaaatcagtaccgataccgcggcggcaaataatcaccttcgccctcgacttccagagtctgatgctagagctgctcgaaacctcaaggcaaagtcattccagcccggcccaagggaacctcgtggtccgtttctcactccctctgggaacattgaccacacacgatcaaattccaccaatgctgtgcggagcccggtaagaaactcttctgccgccgtagcgactccttcctctgcctctaagcgggcttctgttatgccgccacatgccactggacttggtgctcgaacgatcagtcccactgacgcacgacgattgaagcgaatgtcgattgcgcctcctgctcctccaatgccaaatacgcctcccacccagacagaacctcttcccatctgccctatatcatccactcaatctccctctcaaattccgaggaaaagcgtcacaccttcctcgaaccgaaccacgcctgacccaaatcgaaagtcgtacagttcggggctgtctgcttcttcaagcaccagctataactcagtgcgaccttctgcgggctctcttcaaaaccggctgtcccaaaatctatcttcctctcgacttccgactcccaagccacgcacagaaggaaatcccaacggggaagaggtaccaccggttccagcgatccctaaggcctacgagtcgcccaaaagtgaaatggatgcacctgtcttccccacgcctaggaaatcaagtattcctgtggatttgaacattttgaaagattcagactccgaagtgcattccatagcccaagtcgacaaggttgaccctgtagaagcgaaaacccctgattcacgaacacgaactactaatattgtgggaggacgaaagggtttgcagcccttgaaattgcccccgctgaacttattgcctctgggcacacccatggcagccaaaatcgaggcactcaaggacagggacgaggagcacagagctcacaccccctccaaacaagtgatttcaaagacgcccagtactccgatgacagcatccaaggcgaatttctggtaccgtgatgaagacgaccaactgcccctcactcaggcacgaagcagcacctctcactttgccgtcagctcaaccgcgtttcgagcttctagcagtaccagcgcgtttgagtcatttgacacgccaagcgcagctcggaacatttctccttatgcctcatacacgctgcctaagagcggtgctgagctcaaccatctccgccaacagatcagcgccgactactcgaatcgaacgcaagcacacaagttgaatggtccacgacctcaaactcaaactgccattatcactcctgccccggaacggctcagccagatatcgacaccttcggagcctgagagtgtaactgtcgctgcgtccagcacctctcttcgagaccggcttaaggtggcacggcttcgcagcaactcgaagccccacaagccagaattcgatgctgatccagccaagtacaatgctatgccgccgcccaaacttccagcctctgcaacatggagtaacctttcttccgtcaactcgacgagccctaatcccaagccatcatatctcactcttcgccgccagtcttctatctcaaataccacaaatccgacgactcggaaaccaagtgtcagcagcgagaaaagtctcgccttggagccaactccttccaatgagtcggttgaaagcgaccgctctagacgtgtgcagagctcgtacatctctcctgttcataagatgatcaatcatgctagatctagtgttgccgctgccccccggtctaccgacagcactgttgatccagatgtgattattgcagatgaagagatgaagcgacttggggccaaacgcaaagactttgaaaaggcggcgcgggtgctagacgacttgcggcgcaaggctggaccaaaggatcgtgtcagtcccgcccaggccttgaagatggccgcgctcaacatctttgaacgcggtgagatcattgattatcgcgatatttacttctgcggtactcagaccgccaagaaacatgttggagatcttcactccagtgcagcgaacttcggttacgatgatgaccgtggtgattataacatcgtcgtcggcgaccatctggcttaccggtacgaagttgttgatgtcctgggtaaaggtagttttggccaggttgtgcgatgcgttgaccacaagactggagctctggttgcgattaaaatcatccgcaacaagaagcgattccaccaacaagccctgattgaggtcaacctcctacagaaactgaaggaatgggatcctcatgggaagcatagcgtggtcaacttcacccaaagcttctatttccgtggtcatctatgtatctcgaccgaactccttggcatgaatctttatgaattcatcaaggcccatgaattccggggcttctcgttgaagctgatccgtgttttcaccaaacagatgctgagcagtcttgtgctgttgcacgcgaagaaggtcattcactgtgacttgaagcctgaaaacatccttctcgttcacccattgaactctgaaattcgagtcatcgactttggttcgagttgctttgagaatgaaaaggtctatacttatatccaaagtcgcttctaccgttcgcccgaggtcatcctcggaatgtcgtatggcatgccgatagacatgtggagtttaggttgcattttggctgagctcttcactggctatcccattttcccaggcgagaatgagcaagaacagcttgcttgcatcatggaggtctttggtcctccggaaaagcatctcattgagaagagctcacgcaagaagttgttctttgattccctcggcaagccgcgtttgacagtttcatccaaaggccgccgacgtcgtccaagttccaaggagctccgacaggccttgaaatgtgatgatgaagccttccttgacttcatcactcgctgcctccgctgggatcctgctcgtcgactctcgccccatgacgcattgaaacacgaattcctcactggtgtcaaggcgccccggcccaggatgtatgcatcaaactcgccccccaagcgaggtgtcacgtccgggcctcgtcctctcccagatcctccaggcacaactctgaagagcgggttcatgcgcacccgcgatgcttcggccaattccccggtcaagtctagcggcaagcgacactcgaccgtgaatggcattccgtccagccccggcaagcgagggtccagcaactctactgtcgggtccgcgctcccccgcgtttcggcgcggaatatcagcgggaagcccgacctcgctactgcggcggctgcgaccagcctggtgagttaggccagcaacctgaaccggggccagagatgggatgctgaccagccgctagaggaaatgatcttgcacgtttttttttctgaatgcgctgtaatactaatccttgtttttacgttctcatccttgcatcgggtggttgtcatgttagcattttgttccttgagatgcattcatgttatacccccttgttcctgcatttgcattgcgcctctgatgacctgagtgttcgcttataccttatgttttgctcttgcttatgcatttccttcgtttttgttatacttgatgaaccccattagggccatgtgtggtcccttgtacattgttacctcttattgcatttcttaagagtttatgtgttgctcatgggtagagcgatttaacgttgtcaagtggcgtctatgctgaattaatgaccatgtgatttttagttttacaacttctataaataagagactgaataataaagacacgttaaagacacgatatagaatgcacgttgttgtactggcattatccccactgggcaatcgggctacttggcctcatcgccttatcttagttactccacttctacaacaactttggcctttatgggtaattgattcgcaatgaatggcttcgaatctaagggcctggacgaagattccttcggcggcaagcctggtctgactgccctgaagaccttcgacgcctttcgtgagtaccctcgagattcaagctaaacaaaagctaaccgacctccaccagccaaaaccaaagcctcctacacaaccccaacacgcagcggcggccaatggaccgtcctgatcctcataatatgcacgatcttcagctggtccgagttaaaaacctggtggcgcggcaccgaaaactaccacttcagcgttgaaaagggcgtctcacatgagctccagctcaacctcgacatagtcgtgcacatgccctgcgaccagctccgcgtcaacatccaagacgcagccggcgaccgcatcctagctggcgagctcctcaaacgcgacgacacaaactggctcctgtggatgcaaaagcgcaacaccgagaccaacgccggcgcccacgaataccagaccctctcccacgaagaatcagaccgtctcgccgagcaagaagccgacgcccatgtcggccacgtcctcggcgaagtgcgccataacccgcgccgcaagttcgccaagggcccgcgtatgcgccgcggtgtcctcccggactcttgtcgcatctacggcagcctcgagggaaacaaggtgcagggcgacttccatatcacggctcgtggacatgggtatcgcgagaacgcgccgcatctagatcactcgtgtatgtgttttactttgtcacaacccatctacagcatcgctaacagctatcagcattcaacttctcccacatgatcaccgagctctccttcggcccgcattacccgaccctgcagaatcccctcgataagaccatcgccgagagcgaggagcactactacaagttccagtacttcctctcgatcgtgccgacgctgtacagtcgcgggaagggcgcgctggacgcgtacacgcactcgccgcagacggcggccgcgcggcacggacgcaacacggttttcacgaaccagtacgccgcgacgagtcagtctaccgtgctccctgagtcgccgatggttgtgccggggatcttcttcaagtatagcattgagccgatcctgttgctggtcagcgaggagagggccgggttcttgtcgctggtggtgagggttattaacaccatttctggtgtgctggttactggtggctggctttatcagatttctagttgggctagggaggtctggggtcggaggaagaataggtcgtcggaggggtatttgacgggcaagtcttctatggattgaggttattttggttgtttcacttcgaatgttttccttgtcttattatatcgtgttccatcatatatcctacgtcaattgcatcaggagttcactctttgcatcgaagttcattggtcaactcggaagtcgagttcgacctggtatataagtagtaattgatcgtacatcccgcatacatgatgcatgcaaactaaacctcaaatatctcccccatgcctacgccagcaccctctgcaccggcacggctatcgaccagatccagacgccagccgttccagtcacgcagcttgctcttgatatcgcgcatccattcaacacgcttccgggcttcctcctcggccagcgcacgcgcgaatgcatcttcatcgaactcgtcatcgaggttttcttcggaaacaagctcgagactaccacgggtaccagggggatgaggggatgaagtttgagcgcggtttccaccaactcccgtaaaggcagcaaagccgctagaaagtactgtggagaaggacgagtgctgctgctgctgggccatgctgcggcgacgcgcatggtcgggtcgtccaccgacgagatcgacgtcgtcgaatgcattggctgcgtcaccggagacagcgctaggtccatcatccgggtagtactccatctcctggcgcttctcttgccagacgccgcggcgcagatcgaagacctcgccttccagctcgcggattcgccgctcaagacgctggcgttcttcgtcctcgagctcgtccagggcttcatcgtctgcgcctccactggtctggcgagttcgaatccgatcactctcttcgcgtagacgcaggttctcgttttcgatgctagcgatctttttccgcatgacagcgatttctttgtcggatttctcgctctcgcgtagccgtgtttggtgccgggcttcggtttctttgtgaaggttgcctattgcctggagtttcttgtcgagcgtctcgattttcttttcagattcgctcttttcgttcttatactcctcaatctcacgctggaggttcttgaccagagtttcggtggatgtcttgtcaacgccttccttgactgctttctcggaggcccgcgtcaatgcctgcttggtgtctgccagttcacgctgggattgatctagtgctgattgtgtctttgaaactttctcctctagcgctgcgacctgagactcatgtgcatcgttagaggacgtttgggaggcgacctgggcgcggagatttgatatctccaactccatagattcaatagtggctgacttggactcgagctgaagaacaaggtcggctggcggtgactcggttgtagttgtgtttcgatgtgaccgggtctggagctgtgagttctgtcgctgaagagaagaaatctcctccttctatttcgcaggttagcaaatatggctaccacggaaaatacgatatcataccaacgactcaatgcttgcaaccttctcctctgcgtttttcaattgttccctcaacccgacggaatcaacactcgcatcccgcagatcctccacttgctcctcagtcttgcgccagcgcagagttgcttccgagagatccttctccaggcgtttattttccttctcaagctcctcaatcttagtagactgtttgcggaacacttcgtgaaccgactccccgtccccggttagaggcggtaatgactgtgaaggggacttgagcgtagcagaagatggagagggggagacgcttccatgtgagacggaggtcttgcggaatgaagacgagcgcatcttagactggattgacagtgaggcatgtcggccgtggttgccgcgcggtgtatcgagccggactggcagcggctcggcgtctggaccaggagatgtgggcgctggaggcatcggttcagtaggagactcgatgtttgtatcaacggcaagttgcgactttggttcttctaattcctctgcttgttcggaggccgtggcctcgggttgcgcgaccggctcatctttctcctccgcgggggtgtctgcctgctgtgtttctgggctcggggcatcttcagcaggttctgtctctgcggagacctctgcgtccttgggtgtgtcggctccggtggtagtcttcttggccttctttttcttttggagctgggcaacctagagaacaacagtcaagttagcgaccaaaacaacgccatctgtcactcgcggggaattacccttttcttggctgcggccagcttctcggctttgatgcgctccgcgtcgtcggccatgatgaatcttatgaattgtatgagtttattcaaatggaagttgatgagtggaagggagagaatggacagctctccaatgcacggaccacgtgtctgatctatatgcccaaatgagacgtgcaggtacgaactagaggtcgatgcgctagatgattacatagagccactctactattatttctgactggacattagaaggtgagatcaaaaatacaagcctacatagcaatatctaacaaatcctacttccccagctccatactaaccggcaggtatatatatatatagagactcagagcgagtgagtgattttctggtttttctaggttgggttatttcagacaattatccacgaggagttggtaagggtattgatcagagattcagagtcaatacagcttgtttacttgacaagaacgatgtgataggggaaacggccccagagagttgaagcgtggaagagccatttaatgccttttgccatgcgttatggaggaactctgtcaccggaggaccgtcatgtcatctcttgaggttgatcgagatatggtgtggaattacgtatgtcctggtcgtggtggtcaacaaacctaacaacgggcctcctcccgtatttccattgggcgttgcaattaatccacctgtcgccagcgaagcgaggaggggtctggacgcccttagtcttgctcctttggaacaactgacccgagaagagtctgtagggttgacataggatggtgtgatccctgggcttcggtgctggtcatggcatatggatgactgtttactgtcagtgacagcttccaaacgaatatcaggagtcaaaagcaacaaaaaggcttacttcctaacattgataaatctgcataagacagcacaaatccaaaaatagacatagtgatattagagagtaagtcacagaaagttgaggggcagtatgttaataccctctcgtgaacaagaaaccatgcaaggaatcgcgccattcaaacaaagaaagaaacatttacccaacaccgccagctagaaatatcatacccgatcaacggggccataagaagataaacaagaaacgaacaaaagcaaaagcataaagccaagtcattgatatatctagacctccatcgagtccgcaatttcttcactcatcgcgcggactccccgacggttggttggcatattctcctcgtcgtcactgatcacataagtgtcgtagtcatcggtcgtccgaatcgtcttcggagggcggtccatctcatcatcactgtcgctggagataaggttcgatctagcgcgttctccaaaccaaaacttggcacgcttgctagagctgagatccggtgtgaggtatccgtcgtcgtaggtccgcttcccggtaggcgtagtcgccatctcgtctggggtgtggctgagtataggaatcgcgcgtaggaagatgtaacaaacgcgcttgcgaatcgggttgaagaagaagaaatgtagactccagatagctccgtcatcggcatcggaagggtcctcctccggtgaatatgagtagatcgaacactccttgagcgacatgtgttcatctatcgttttccacacccgtgggccccaggcagaagatgatcctgctgtgtatgatccagaaagcgtcgcaggggatgccggtgataagttgatgttctcgcgcggtcgcaggttgagcagcgttgagtcgaccgtgttcatgacgcgtttcaaattccgttcgcgtcggaaatcagtggggcgtaggacgtgtgagaagtcataatccgggtgacttgcgttcagagtagcgatcagataggcaaaggtccgtcgactcgaatggtcgctcaggggtccgaacgggctggaacgcgatagattgagggcctcggcggcatcgtgtgcattaggaggtgaaagtgaagccgaaaaacgaaggaccgattcatattgagcctcgagcgactgttcgatatggttgtagagtttccgatcagagcgtgccgccttggtggtgtaaatatcacagccgccgacgatatggcagtcggtcgtatcgaaatttagagagctcgtcacgtcctcgaagtctggaagtgggaggaactatatcatgagagagtgagtaaactgagagaaagacacgttgggttgcgaccgtgaggcataccttcatcgtgaggttgaaccggggtgtgtatccagataagccgataaggagcttgaaatgacctgtcacagtctgctgttcgaaaagaatgactcaggtctctcttctaaggtctgagagagagataagacgagggaaagtggtgttaccgcaacgggtgattgaaccgaaggtggatatccgatgatgtagatgggcgataacggcaaagagggttgggataagggggacacgaactacactgggcagatcgccagtcttatagcaagtcaacgccaatgtcaaatgaggagtatacaaagagatgatgaagcaagaggggatgggcctatccggggatgatctgagaggggagggattccgaaaacagtcacgtgtgggcaggcgtggcccagtaggaacccgcactgacctcacgagcagtccaaccatggaaagggcaacttcataggccaacaggcccattcaggctaattcacagcccaatctcgtccaaattgcgtgttatgtcttccgaagcctgggggaaacgagttgtattgattagtatggtgaatgtgaaaaactcctatgtacgcccgcaaataaaaaaggagcaagaatcctgcttgctgcgttacatgatcttggtgaccacatcttcctcaacctggggaataattagcccggctgaaacttggccatggctggacaaaggggggggggggataaagagcnnnnnnnnnnnnnnnnnnnnnnnnnnnnnnnnnnnnnnnnnnnnnnnnnnnnnnnnnnnnnnnnnnnnnnnnnnnnnnnnnnnnnnnnnnnnnnnnnnnnnnnnnnnnnnnnnnnnnnnnnnnnnnnnnnnnnnnnnnngtcgggagcagaagggggggggggggggagataaagagcccaaatatagccagcagcaccgttcttggttcttttcgttgaaagtgccaaacaatacccatgaatggaaataaaaagacatcttaactcacctccatatcttccaaactgtcctgctggctgatacagcgaagaacattcttcttgctggtctcctgcatctcccctgcaatcaataactcatcgaggataaagtatgctttctggaagttgaagatgatgtccagctcgcagacattgccgtagtacttgtccatctgctcgacgtagcggtgcaccacctcgagggtgatcagctcattatcggtcgaggcacagccagcgatgaagaagagcgaagcgtagcgacggtaaacgactttcgagtctagtgatggagtccatgttagtccaattccagcttgtcggcgatagggggtaggggtcgggtcgggggtagccacctttgtattccaggaaattgcacatccgcgtccggcgggacagcaccagctgggttacatctttgatgatcttggccttttccttgggggagagagtggtgaaccatttggcgaggcgctagggaaacgttgttagttggggcggcttcggccaggtgttaagtagttgggtcggtgacgaggcataccactttgccctgtcgggagagcagaatcaggtagctaatggcgggtcagcggtcgcaaattgaagctgactgaaggacggtctcactggataggcatattggtggcgttgtgaaatgaagggatggagaaaagtgtcggggcggaagctctggagaaattctttgggtggagcggaggggagttttgccccgctaagccctagcttagcaatttaaacgtgaagattcaatagttcgattcaagatggatagttgtttctgctagaagtcctaatatgctttgtgcgtgtcttgcgcgcggaccttgaatgagtcaacccttgcctgccggagtttctggaaccatcagcttagcaaagctagtatcagagcctcatgtacggatttggagtaaaatagaactgcataatatacggtcgggctattgttatttgtttatatgtgtgcatgctatgcgacctatgtatgttcgcaggtgatctataaaaattgtggatgcaacatacggagaagatgagctcaaaccataactataaggatgtcagagatccatgacttggagaattaagtaaatatttacaactaaataaccagagatgtcaaactatacggacatacggcactgaaagccacgtctaagatcataaagtaaaataagagtcaacgccaggtaaacccttagacgatgaaaaacaaataattattaatgaaataagtagtagcacattaagtatcagaacatccctctcatgatcgagcagagactagagaggcagcgtttccgtcgaatcgttgcaggcatgagagcatgagcatggaagacataaaaccaagaccgagagccctaagctcgtcaaccacctcaaacatataccgatatcgctcaactcacgccattaagcagaaccagaaccatacctatagccatgatccagtatcaattaccaggtagatagattaccgcgacaaggcgagcgatagcaactaagcctcaggccgagtgtaaaccacgcccgctttccatgacaaacgacccatttaaacctgggtcatgttggggcgggcaccgccgcgacggctagtacggcgcgagggaccagcagaggaacgggccatgaaggcggagacaatgacggaggccatgtagccggcccaggcgaaccagaggaaagcaacggaggcctgggcttcacggcaacgcttggtcatgttgtgtgagccattggtgatctcattgttgataaggtactcctagagggagttagcgttcgctctcatgtcttatatttgcaatccattcaagtcaacttacgtggttggtgcaagagtggcactctagcttcgccgcgagcgcgatggcagcgcagaagaagaagatgcagttcagggcgtcgatgatgatcatgatgagggggtggccggaccagtcgatgttgaacgaggctgggaccaggtagaacaacgtgaacatcgagaagaccgatgtatagatggagtagtttacggtcgctgggttgccggcgaaagcttcagcgatcatgttaccgacgagggccatgacgagcagggagaatacaaactgtaatgggtcagtactatattcaacttgggattcttatagcttcaagctttaagcttctagctgtcgcattgcaattgcactcacctcccaggctctgagaccgagctgcacacctctgagacccattttgtagatttagattaggtcgaggttgatttagatccgattgtcgcgttagatcgcgaggaggcaggctggttggaggggtataggatggcgaagtcgagtaaagaataagcctataggtcgattcagcagtatataaaagctctgggaaaacgtcgacgttatgaatcggatgttccggagctcagtgatgacatggaaaagcaacatcttcaaaaccttaaaggtggcgatacgtcatgcatccggcatacagcggcctcattggactcggttgcatgtacagtggtgggatgtcggagatgaaatcatgagtggttgcactctggtcgatgatgagttctcgactagctcaggatttccttgaatgaggcctccattgctgttctttgatccacttgggtttttttttctcacaccagttttgaagattctgctggaagagacggggggattcaggttccatttccagtttgtgggtttcccctcattgacagttacaggcttggcatttctaggaacggcgctgttggacgatgtcgatctttacgattagtggctcgataaggctgagatgattgaattctacgattgaattctaattcgaacaaaaagactgaagattctattcaaataaaaagtaaaagagaaaccataaccctccttggcgttattagcaccacactaaccaagagagttatggaacccttattggtagtttattttactttgacctatataaaagagagagaacacagtgaatctttcaattcgatgccatatctatgttgtacacgctatgaccttacatctttatccgacacaatccccgctaaactactgtctactaccctatatacttttatatagatcttatttaataatttagaatttggtagttcgtcttggtaaaaaacccactttctatgtctccgtgagagtcttcttatagctgctcaatcaacaataaagcttgcttcaatttcccagcgacaacagagtgtccgtttcgtgttgctgctttgattgccgtttccatcatctctccgggtgcaggggcgtcgaaattcacctgatctgtgagtagcacgttcaccatttcaaagtggccacgctccgctgctgcctgcaatgctcttcctctgtcgtatccggacgcaggcaccgcgacttcggcccgggctgcgaggagcctctccccaattttccagtagccgcctatgactgctaattggaaagctcttgccccccagacttcccaggacacacttctcttaacatttgcccgagcttcgagtagtcgttccactatttccaagtgaccaccctccactgctacctcaagagccgaggatattgtttcttgatatccaaaatccgccccagctgcgagtggtttctttactgtttccaagtgaccgtgtgccgctgctccttggagtgctgtttctccgatcatcctatgtgcaggaatatgatgaaccgcctgggctgctaacagtcgctctaatattttcaaatggcctctctttgcagcggctagaagtgctatgcctcccttgtcatgtgtcccaaatgagttgatttcctcggccgccataagcaaccgctcgacaatcttcagatggccaccagctgctgctaaatgtagacatgttttgccgcgtgaagaaatcggtctagcaaaatcggctttctcgctcagtaatcgctccacaattttgagatggccgccacctgctgcagcttctagcaccgaacagtcgtcaagaatagtattcacgtcggctccagctcgaattgaaagattcaatgaaaagatgcaacctgattgagcagcaaaaaacaccccatatttcaagacctcaagggaacttcctcttgcaacgatcaagtgcgtaaagcgaaagcgatatttcataggggagcccttcaagatttcacacatcgcttcctctgtgagactgtgaggttgacgttgcataatgtagaccaacagcgtaagatgcccggaactaatcattgcctgaactgaggttgaattgtggctttgttctttttggtcccgctgcatgggctcccatggtttttgtgccgatatatcatcgtcttccatgcatcggcagaagagcttccatatcttctggtgcactacaggatttatgagcgttgtgtggtagatccaatttgtctcggcatattcatggaactggaattcattgtgttgtaccgggatctgaccgggggatttgaactcattgcgaagcgcttcaattttgttttcaagttctcgagcactaatgccctgcagctgatgacgacgagacagcagtttcagtgctatttggttggtcgcaccattatgactatgtatgcgcgagagaccaagctgaatcgggtttagtcgagtattggagcttttgtcggctctcgtcaactgacgcttgaagtcggaaaaatccaggtaggtcatgcagagaaacccgagatgtcgatcgagtttttctacgtcgaattctcttaagtgtgcgctgttggtggtaaacaggtattgcttgacactttggtgaacgtaatggacagtgtcttcttcttcgtcaatatacaccaagccgcaacagtcgctgaaaacgtgattcatatcgctggggaatttcccatgttcgatggactcttgtccgggagaaagactcagcgcttctcgatactccatgacagtcaaaggttttttgaagacaccgcagtattgcaacaccttgatcgcgttgttattagtctgtcgatcgtaaatccgagatatcctgcgatcaaatatttccaacaagccacgtggaagattgttgagggcatttatgatgtcgttgtcgcaactttgggcgcagaggtcttcgatgaacaaacgagtccagagaaacctgtttaattttcctgtgagcaatggcatatgttatcatttgtggagggcggcgaaaacaatatatatcaaaaaaaactgtttgtggccgtaatctatggaaaatttcaaggggaactaaagaagaaattggaaattggaattgaatgcttcatcacttacatgccattggatccctcccgtaatgccgtggagatcctgattattagaccaggatcccctaatttcagatcttcttcctcgagacagcgaccgagggtagtcgaaatatagtgatctatgtcccgctcgacgtttacacccgtgattgggatagtgaagtcaggtctgaaaaccccgaaaagcttctcttcaagctcgtaccgaccggcgcagatcagcttgaatcttttctcacggcttttacataaccgagctagttctgatgacacctttttgatctcggcgctatcaaattcatccaacccgtcgagaatcaagaaatactgcttcttaccctcaaggtatgaaagaagcaagtcgataacatcttctgtgtccagacagccgctggtatcctcgagctctcggagcttggcattgtcttcaagatcaatttgcgaatctagcaattgacgggcgattgttccaaacaggcttctggccgatagggatgccgtttcctcggcacagcagatgttgtatgagataacatcattgggctcccgtgatctgtatagatatgccactatattggacataagtgtcgtctttcccacacccattttacctgggcaccagagaacggcactatcttgagaatccttccaccgaaagaaggtggtttcctgttgaagccactctgccgtagaagaaacgcgctgccttaaagcctgcttccatggcttcacaaaattgatggttgagagattatctttgatggtggatctcaatttcgagttttctcttttcaacttgttcaggcgccatccgttggcttgtgtgtactccttctgactttgctcatggaagttcaatgcgcgccggcggaagtacctgttcctttgggtttcataatgcagaaggttcctcatttcctcgatcgcctggttcgcggctaatgtaatctctagacgcacatgttttgcggcttgctcgagctgaattaggagtgattggaactcgaattcgaaaggattgaaaatagacgataagatctgggaaaatggagcccgccgcgatatctccattgttctaatgcaaattcgaacaatgatagcataataattgcacaactcgcgctggagaccggtgcatccggggtagagctgaccaaattcctggtattttggacaagacttgccaattgccatgatcatgcttgtaagcttgtcaaaataggacgagatattgcttgctgacaggatagccacttttaaacctccccaaatcagaccggcgatttgaggattagagctgacaaatgtgtccacgatggtagtgaacttctgcgtcgattcgagaaaattatacagctttactgcaacgcttctctttgtcttagtactgttattggcatcaatctccgccacgaatgtaacaacactagaaatgtctggactttggttgctcatatgaaactcttgcttttgctccttcgtgaggacactctcaaatgcctccaacgcttgtgtaagagctgccgtgggatctggtgttccgggatggcgggagagaggcacaagttcagccatgtcgggcaatgagccttatttgggctatctcaaacgttcaaatacttgatcgcttggagatacgcagtatatcctcgtatggtatgggcggacgtgatagagattaaaagaatcaaggagttgggagttattcagcggcctagcattcggcatggggaagcgatagattcgatttggtaacctgcaaatataaggcaggtcaaaaagtcaggggtggctaacgtcgtcagtatcggtgagaggcagcaggcagaaggacacctgattggcccctatgcgcgcctgcagatgcaacaaaattcacagcctcaaagctggctccaatgttcaaccaatcatctcgttgagacttgccattgacgtggcagtgcacaagagtaagcagtttgaatatttggtcgatgagctagctctccataccattaatagatgctgtcaacaaaagagagtcaccatctagtagtgcgtagtgcgcccgagggatattcagcaccattatctgcctaatgatcgatcgtaaggctcccaactatcttacttagcttaacctccatttattctgcgcgttctatagtaccatgggggtcactaagaaatacccggcctgtaaaaataattgacgagaaggtgtggaacaacatttttgaagacggcgtcttcggcgccgggccttcgctattcgctgtagtcggggatgccgtgaagccgtccgtgagacgggtagcttgcctataaggcggacgaagcccttgactaccttcttcagctgacgcttcgtctcaagggcccgtctagagaatcaagaagtcccgtgtttgatgcccttggtaggtgtggttcgtggtactggcttgtgaagaacccaatgcgtgcagaagcaatggctcgaagatgtcttgatgcggattggaatgattatgtctgtggcgtagctggtacgcagttcgaatgagctgccgagtcttgtaagttgttggtcaactttaacagatagttttctttcctttccctgtacttagtatcttggtaatatgcactcgttctcctgaactgaattaatggtatatcacttcctctcagactcactttcaactcacctaaatatatgttcaatctaggtagaaattaggtaaacaaacatggatgttaaagttattagtcaacgcgcgagcctggctgattgcagtggtataaatacccttccatccttaggcttgatcatccttcctcttctcattcacatctcaggatcaagcttcctggggcttactacaagaaatacgttgtctataggcttcctagccagaccagctcaatcttcttttcatttatatccccaggagatgggagaccctagcaagcccaatacctggataaaggacgttcatgatctgccaaacaccgttagtcttgttgggatcatttacgtcctatacctcgtcgggcaggttgtggttaattctatgactcacttccagaagctgaaagatacttgcagagtaagtttaattgatatccctccctatattgagagcagttcgaaggatatcactcagacctgaatactaatagtcactataggaagacggcgaaatataccatggatcccgagagcatatgctacgggctggcatagctgaagtcgccgatatgcggtcattgaagaatacgagagcgaaatggctggatgcgagcaaggtaattactttgcactcgacgtcaaggtcatgccaatttatgagaaggaaaagaacattttcatggctttcctatatcaacccagtcacatggggttctttgctgcagctggtgattcgtcgtcgtctgcaccgagtttgtcaagtcccacttccgatggagcttcgctccgcgagttgacggacttacccaggtcattacggctatcggtcgaacctttgaacgctcatcggggtcacccgatgagctatcctttggagatgatggcgggccggatcgaagggcggaagtgagtgatgcagcagagacggtcaggcaagtccaattccttctgcggtatggtgattatgctggcatggtgtggaatgttctacgtcggatctcgcgactttccgacacgcctctgccagactttgtcgtctcattcgataccgacctcgacgttggtggagaagaccaggatgatggagcattgccaggcgggacccccgcaaactctgatgccactgttaatcgcgattgtacctatgtccggcccgatggaaagtccaatccaatggaggtgtgttgtcttggacgaatcaaagaaggagaatactatcggtaccttaaatggatcatatatgaaactgaaggtcagtattgcaaaagctagagttgagtattatattaatggtataataggacattgacaacaaaccattgacatccgtttcttacaaccgtcctcgccgacggtatttgtacttctgtttcgtacctgaatgcaaagagccgaggaaccagtgacgaaaaaggttaaagccacgcgttatcggccccccgccggcgagtagcaatcggtcaatactggttaaattagcccgttgttttaggatcggaactccgatatgtacgacactgcaagcactgggtgtggaatcgacggcgatcaatctacccaacaacagggaggagattcgaatcgacgagcctatggtaaggtcggcaatcaaggcgtccgcgttgcggaataagctctgccacagcagcaatcttcgaggtaccccccagacatcacagtgcagtacgatggagacctttagaatttagtggcactcgtcgagactcgttccttccctttcgaggtcgtgagtcattcccttccccaaatctccgaagctgactgtacggaccatcattgcgattggtcccggtccagcttcaaccccacaaccttattcctgaaccagacggaaccgaccaatcacgatggttccaccacgaaacgcagcgatcggcaagggtaaacccgcgacagtgctagatcgacatgaggaagaaccggttgatcccgaaacctcaaaccccactggtgtacaggccctcgttgaaagtatcgagcatgatgatgccggagaaggccctttcaatgttcgtgcgatcctcgacgcaactccgaatgatgattgaattctatattctaattgaaaagaatgaagcttctattccgattagagaataagaacaaaaaaagtaaacaaaccctcgactctgacgttattagcacactctaaccaactgagctatggaacccttaacctttgataaaatagtttcttctacttaatctatgtaaaaagatagagaacagactcaggtatagctttcagttctatatgccatacctatactgtatgcgctatagcaccttacaatctttatccgacacaattcggttgtctactatgggatttatattgttatgtcttttttggtgtcttttttggtatatcctatactgctatttggagccttttgatactactattatataacttttttatatagaaagaaagaagaaaaactggtccaatactatggagttaccatggagcatatgcttgtatatagtatctctcttaatgcgatatcacttcctcttactagactcactctaaacttacttcaactcatctaaatatatgtccaatctattcgctgaatatggaactacagaatcgataggataaccccgtctatattcgcactcaatgataatgtaatacggattactatacaatatagaaaccaagcaaacgaacatggatattcaagtcatcagtcaacgcgcgagcctggttgattgcggtggtataaatacccgtccaccctccacccctaggcttcttcggtcatcagctctcatcccttgatccttcatcctgtcattcgtaccttaggatcaagcatcttagggctcacacaaaaaatatgttgactataggcttcctagccagaccatctcagtcttcttttcatttacaccccaggaggcttgatccttcttcttctcattcgcatctcaggatcaagcctcctggggcgtaactgcaacagatctattttctgtggccagtattgggtctacttgaggcttcttagccggacatctcagtcctaattctactttcatatcggttgttacggcctgaaggatcgatgggtcgttcttgcctgtgtgggaagcaaacattccttcctactaagcgagcataagcgagtatatctgcatttgcattgtttgacacgagacgcacaaaaccatctcggctcctcgttggtcttttcttttattctcctttgattgttctttagaatgcactctttgttcaataaggtgcataacctcgcttatctcgtcgacactgtctgtgtctgagagtcaccaccattgtttgcccacaaaggttcctgacaaattctttctttcgctttcatcaccacccatcttccttttttattcaactcaaccatcgataccttcgtctattcgcatctatccttggaccagcgtggctgcgttttaatctttgttccaacctgactacacaccaaagggacaccgtccagatatcaagcggaaacaaacatcgctttctggaatgaccacaactatatggtcttggatatgtggccattgcagggcatgagaacgaaatggctggacgcgagcaaggcaattaatttgcagtcgacgtcaaggtcacgccaatttatgagagtgaaaacaacactttcatggctttcctgaatctaactcaacgcaacaaaccaattgtctttgcgcgcacagcatcgaaaatccaaaagtcacactcattgccttagaaaatctcgatcatttgaatggatagatcaagccagctattggcacgtttgttcgactctttcagatattgaatcgtctcgctcgctagcttatcttgattctagctagcagcacgaaagggccgagagatatttgaaagacgcggacagatgtgccaacaactggcttggtctatccgttcaaacgatcttggctttccagggcaatgagtgtgactttgtgattttcgatgcggcacgcgccaagacggttggctatagcaaacttccgacgctggcatattgcgctagcctctggattgtctaatctaaccatatgtcctaagaatcaatcccgttgcccaagtcccaagctacattcaggggacatgcaagtttgtgagttcgaagcagttgaaaaacgactctcaaaaaactagaaagtcagtcgtttccggatattcctcgggatacacgtgcttatcgtatgcccagttgcgtgctactcgactcgtcgggttctgcgcatggaaggaacggagcatggaccgcactttcatacagaaggaaccgttccctccatactggaacactcatttgcatggtttggcaagatcgcctacaaagctatgcaatcgggacgcaagtaacattactattcatgtgttaaatcttgctctttctactaccggtagtcagtctgctcctggtgagccttctcacgggtaggcgtcctaagttcggcactgctgcattgggtcagaagtgacaaaatcgacatgaccgatgaacctccattttctactgtatctctatctctagaattgaatcaacttgtctaccatatacatactctaagtgcagttatttgatacacaagtatatgccccatggcaactctaactaatgaaggttatgccgatggcatagcatacttagtcgcccgtctacgtagcattattccaaccttggaagtgtttccattgcaatagataagactgcatacttgtatggataaaatcaaagttcaactccagcaactatgctcaaccaccaccagcccacaaccccaacccccactagctctccccaaaggcactttgcacagatccatacctagaaaagtcagtataattcataaatcaaatccacccacaaaactcacccttgaggacactggctacccaacgcaacactaccactacgcatgtagcagaccttagcctcctgacacgcggcagtagtgcacgtaggactcttaacactcttcttcccttggtaagtattatgcaaactaaccagctccacatccttctccatagcctcagtaacccgatgccagaaagtcgcattcaacggtgcgtcctcatcccacgcagctgcggatccgtacgcctcacgggtagaatattcaatctcaaatgtcggacccgtgtgctccagagccgggaattcagacacattgctgtagaaggtgtatgcctcgtagatgttaaagtcgcctgtatcgacttcgtagagacggaatccgctgttgaggtttgtcaggggtgttatgctaggcatgatccagccggtggtgagggcgttatcggcattctgcgcagtcccgttgttggcgtagtataccatgaactggtcttcgtgggtgtgtccgaagaagatgttggcgattacgtgtggcgagtagcggtctacgatctggtagaatagatcggttgggttggggagggggttggttccgtcccagccgctgaggacgtggccgattatccagacgcgctcgccggcgtcttcggctttttgtagttcttcgatcatccaggagaatacgcctgagttgtccgggttggtggtgttgatgaatgttaggaagttggttcggtaccagaagtctgggagagtgagcgggtgaatactaaatatgggatggcaacatacctgtgttgaatgcgagaatgcgcagtccgtagtgcgtcttcacggagtatccgccataatgcgttctcgcttcatcggcggtctcacggctaatccagccttcatggcgccacagtccagccaggtgctcatagttccagctttgttgttctcccagacggccagggaggttgtgaggagagtcgatatttgcaggactggtgtcgtgatttccaagtgccgcaaagacaggaccagagagatagtgcttgaacatatcgttaatactagtctctgtatactgggtcaatgccttggagatctgggatgccggatcatgcgataccaggtcgccagtataaagcgtccatgcaagatgctcgtcgtgttttcctttgccagttccagtcagaggaccaacagcttgcagagcagcaagacccaagtcatatggggtatcgcacatgaaagagccatacgaagaggcagaaagcagcgggctgccttcggaaaggtcgttggagttgtcgctcctacagcagaggctagacgtgcagtttgcttcagaactaacggcataccgggcatcgagatggaagtctgacagatgcagtaccttgacccgctcgccacttgccttgggaacctgggcatctgcaggcttgggcttggggaaaagcttggtcgtgtcaagcgggctggtagttggcgcactacaaaacttgctgctgagagaatggcagatgtattcaccatccaatccttctacatcggcgtatgccagcacctgcgtccagatagcaccaaaggtgtttgtggcgaaatcttgctcgcacgtctcattggcatggaaggcaaaagccttgcacaggctgaccatggcgttcgggacaaaggtcggggcatgcaatgctgcaggcttcgctgcggctagagcgttcttgcatttggtgcaattgtcttctgaactcgacttgatgatgttggtcacattggatagtgcttcttgaaacagcctatacctctttttggcagacatgtgagttcgcggcataggaaagtagacctcatcttgattgtctgggatgttgtcgggatcagtcaactcatagggaaaggtgaggtccaacacaggatcgtagataatcggctggggttgttgggttggctgggccggggaaacatagtaggatcttgcattcacattagcatatgtgcctaagctaccagactatcagtaatcatacgagaatacagaggtcggaaacccagcagcagccacataggacgcgtcaccagggagtgagacagcagcagcaaggttcaagatcagagatgtagtccccagcaaggccagggccatcttggatagacagtgcgccattactgcaggcgaatgaaatacagcagagaagaatgagagataagcaaagaggaaaagaggtatttacatatttacatacttatgtactgttgcgcaacataatcgcaggtccgatgcacgtggtggtctatacctatgggattcatccgtcgcctttcccgtggcgcagagatctacacggcattgcttgattcatcttagttcctggatgtggaattcctctgatttctcttttttgtacctaagccctcatgtagtatactagctagatgctaggcagtcgaagctttactatgttcaattgcaagtcaattgcatattgtacaaatattaaattggtttgagtctgaacacgctatttaggatctaaagtctgggtggatacggcagttttgggccgcgccaaccgtcgggttaaccagctgccatgaatctcaatgtttcttgttaatatatgggaatggattgctatgatacggggttaatataatcagatcctaataaaagactgattctctactatacaccgacaggagcggaattgaaggtaggatcggagcagcatcgtcggtctcaatgactttcgttatacagtatagctaccctctcccacgccttcgctgagtcaatccctcagggcgcttccgaaaaaattccctaggaatgaaatccccatcttcatcctgcgccgtcccatcgccctcatcatagacaggaatccacccatccggggcattcggacacagctcgcacatatgatcgaattggagattcaaatagagaggccacaacgcccagaccagcaccctcatatatccacaatcagaaggcgaatcatacctctttccggggtcataccgtccatcaacgaccccaacaaacccgtcgtcagggtcatcagtcgcaacaagcgagttcaacgatctctcatcaatcacaagacggacagcaaagcgagattcctcgcagtgttcttcctgcttaatctcacgcagatactgagcgaaatggccgcgaacttgctcgataccggcaccgtcccaacgactcgagtcggagatgatcacgtccttgtgggactcttctatcagatgctcggggcgagggtcatccccatagttcaattcaccctttatccatgtagtcatcacgcgggttagcttttccatggcgatcggccacaatttctcagactcgggcgtgtagactgttcgatagatgatatatccccaaggaaaatggcatgggaatcgttgggttaggaatcgatgggtaatgcgatctgccgtgtttctgtagcatggctcttccttccactttgccatggccttttcggtgaagtctggatggtgccagcgttgtggccagaccgggtgatggtagtgtttgttataatctacttccgaggcctggtcgatggggttgaccgaggcagattcagatagggacggagttgaattcatctgtgggaagtgacacaaaataagcgaaaagagggagagaagacaggtagtaaattataggagcaccactttgacaaggataggaccaagggagaggaggttcacgcgcgggtattgatggagaagacctgaaaaagacctgagaaggtttaaataggagatggatatatttgtttgaatatacttaggcctactcatcgaccaataatataaagtcttatgattaatccaaatagtgtaaacgtaaacaatgtagtcttataaactacatggagatagttatagagatgccgggatttgtatgggcccaaaggcttcgcgcaagggactcaaaaccctgccgtaggtggaagtggactttcgtacgtaagaggaaagtgaggttgacaaccctagtataattatattatttcgagcccagtggcttcctatctagcataaactcattgagtggccagtctctcatggactttttctttagatacatgaaaacaatggtatcccaattccaaatcccaccaatcatgccgcgaaggcttaacgtccaagctgttctgtgtgaccactatgatatagggccagcgactgaagatgcatgcacggaacccgatagcgagcggtgggaagcgggtcaactcccagatgatagattaatggtgtatccgtgcgggagagcagcaatagtccgattggctcgagcagactgatacaatctgtcgtgctcatataggacatcaataggaagaacactaccctgttggcattcccaaggaattgggggaagcagaggatgcagatggcgatcagcggatcagtaacacccagagaagagtcgtgggtgtgagaagttgagagccagacaggttgcgtgctgttgagcgcaggctggtgataggatcctggaggcggggtgctcgaagcctgttgagcttgttgacttttggatgtcggaggtgatggactcaattcggcgatgaagagtaattagtgattccaaagcgagcgacaagtatcaattgtaatgccatgtcgctgtacagcatagattggattgccacatttcttcgcgggcgttgaatcaactttgcgcttgttcatcagaacttgctaaggacggcaccgcgggcacagatagataaattgcacgctgatgtattcgccgtgacagtcatggaatgcactgccaaagaaaatggttgcctggaatcttgctcggactgcatttttgtcggaacaccatggcctggcgagcatggacaaagactgcaatttaattatcgagagcgccagagatcaacggcgtagtgtcacccgcccagaaagagaaaagaaaagacccgaggccgatcttcagatcgactccacggccagtctaatcatgggagccactggacgatccactggaaggggcctgtacacagacgagttcaaccataatatcgtttgggttgtctggcggtgcactattataagaaggagcgcgactgatgatgcccacagccacctgggaagcctgcttgtgggcgctcatgtgatcgagataccagacctgccaaggccaagcgcccgagccaggtggcatgatagtaacgttctgaccggggactcgttccctggcgaaatctagaaaagttagaacataacgctaggcagaaaattaatcgacatactttggaccggaatagcggcgacgtcgagagtgggcggcgggcacgaagtcagcgtcggcggctggatcaacatgttgttgagaacggcctcgagaggtttggaatagtattcgcccgacacggcaagaagatatatagcattctgcagggcggttttcagatcacgggaacaatcagcgccccagataccgtcgcagccattgttcgcgccagaaggggtgccggtcaaattgccgatcctgagaccgatttcggatgtgcgatttgaatcgacagcactgaggttgatattattattttgatatcccagccaaaacgccgtcttggtcatggggccttcgcccttgccggaggaactggcatcaaagccgtagtagagcgtgacggggtccgggaataaaggtttgaggtcgaagcggattgcggtctgagcgagggaatcgatacagccattattccagaacgagcagaactgagcggagaccgattgtagcaacaccaacagggctagagataggctcaggtggaaagccatgtccaggatatatgtccagcgagagtgaccgcggaggccctcaaagtcaggataatcgagagcagaggtagggcaaggtcattacggggaaaggaggtaataaagggtgggagattaactgataaaaggccgtcaacggaagccagggaaacgggtccccgcaatacctactagggtctgaagagaatgaggctagtgccagtggaaagccccccaaaaaagggtctgattgttatttcggggtcctagggagaacgaacaattggcgctgccggtcgaacttgggaaaaagaaaggaaaagaaagtgccgagcccttgccaaggagaaaaccaaatatacagattgttgcgacttgtatgtattatttcaggtttctcgcattcttgtgagagcgatgtgatgggggataactcgggtacctgctgggtacctgggaggtacctgctgcaccctgtgggtttaggggaccaacaagtctcctggatgtacccccttgattggaaagggaatcttattttcagcgctaaaccagaagtccccgcattgctgtcccaaagaggaagttattggtgtcgatcagccacagggtaaagcagggtccagccacttagatgcgaccgatgcctcacacttggcactgcggtgtattggtattgtattggtattctatcgatcctttccttttctgcgtttaaggtcagatctcccggatttgcatgacctcatgttcattccagacgtttgaattgctagcaagggtattctgtactttgacaataataataacacaacacccaatccatacccggatgagatctgtgcgatatgcacgtcgtgatgcataccagatatgtatgatccttgcctgtgctccgataggctcgacggtaatatagctcctctgacgtaagaaaaaagcctgaaataattggcactcgctgcgtcatttggtttcaacgtctgaaacactctctcattggacgttgcgatctcgggttcgcatgttttcagccagagggttcttggctgactcggctgtgttatcgcgagacaccggagtccacttaatccagtaatcctccgtattcacgttactccgtgctcggggagaaatccctcggaaacaagattaattggaatgccggcttaccttctaactttcaggtatgtatggagtaccaacattctgggcatggaatattcgaaaattcgatacataggaaagataactgattttggattttgagtagggacctagaataggaaaggacagacttttcaaccaacaagccgagcgtatattaggctagggagttcaaaacaatacttctcgaatgtcacacatttcacagcctgcaattcatcgaactcagtccgcgtgatctagcctgtcatcggcggagttaagccacaggtatctctcgacgtcggcgctttgtgcctttttaaattgtcaagtgggtcattcatttgcgagtgagactgagtgccgggcacgccgtacttgtcgatggccttaagaggcaagaggtgtggcatgtcaacaatgcgcgttgtcggtcatcctgtcttgcagcttgatctccatactatactaaacaaacatgaattgacggcaaacgaaagggcgattgaaactttcttctgttagaaattagaaggcccgttgtgtaggtacatatacatacttcaacacttttggcttcaggtcgtatccccgaagcaagtcgcggtgtggtcgcatggaccataagaccgttcggcgaaagtggtattattgacgaatcggaagcgacacactcgatgaccaccagttcgccaagctccatagaatatcacaccggcaggggcgagaaaaaaaatccaaaaatccaagaacacaaagatagaaaattgatgcatattgtacaatgaaccaaatgagcgttaacatgctccccttaacataatgtacatccccgaggctttgccccatgcaaacagttagacatatacaaattcgaagatcaacaatcaaaattggagggagagtttcgatcacatccccacgccagaactccacgcttgaaaccagaatgcaatgattggtagattacccaaaacctgacagtccaaatcagaaatggacgtcaatcatttgtcgttctcaatggaacgatccttgccgtgcagccagacacgcttccagggaccgtcaggtccgaaagctgcctctcggtcttggcgcatgccttccaggacaccaacaacaccgccactgcgcagacgctcaaggacaatgtgcatgccctgcttgctcttcaatacggcctccttagtccgactcacaccgatgagctcaatagtccgctggatgccggcagtggaaaaggacgcgaagaatcccttgcgaggctcttcctcatcatggtccccagtgtcctgcttcttcttcccgagcagcttgccctgaccgagtcgggagcggaaggtaaccgtagtcttgacatgagtctgttcgcttttgtcgagaccatcgagggccaggcggtcttcctgggataggagtcgcttgtagcattgcttctcgaccacgctcaggatgcccgtccactccatgttgcgggactcggtctccatccacccctccttggcgtcaacagtggtcttctcgaggatatagctctggccggaactgtctgagccgcccatgccttttggcagaagctttagaattccagaggggatcttggactttttgaggtgtagtcggatggtgtgcagacgctcggtcttggggtcgacgtatcggtcaatgacatcggtggtgaggacatggcgggaataagggttaggatagcggaggaagtaggcgagggacacggcggggaaggagtagtcgtaggtgaaattgttttcgaaaaacttcatgatggcattcggtgattcatgtagatggattgaggagaaagagcaaggagtcgtctgatccagcactttttgcctgggcgagcaaaggtagaagtggggatccaaggggattaatagttattccggggaatcagatgctaaagatcacatgcatctcacgtggtccggggattaggcctatcatcggcccgcaatagctaaacgatgtagaccactctttttgtccaattgaagccaagctgatcaattgactctaagataaatatgaatactgaaggaggattctgcataagtatggatccaatacagtcaagtccgacacagattctatactccatgtacataaaggaggtcacgtgccctctgaaatcaacatccaatcacccaaagtagcggtcaagaacaaactagaacccaacttatgatactacgagctatgacgggctatcaacgaggcttctcaagatccatacatgaacagtagagagacacaccaaacaggaaaccgggttaggctctcggatagacacgtttccgcgcaatctcacgtgatatcaatgtttcacccgttacccggatgtgtattgcaagcccctttataggccaacacatcccaggctaggcagaggcttaaatcgcgaatcgaattcgaggctcattcaatacaacgcagaaatggtccagtttcatgattgatcttcatcctctacctttataaacatgcatacaactaccgatcccgtccagactatggagactcgtatccgtatcaacattaccgctcggcaacgccaactgccatgagtggtccgatgtcctcaaggcaaaccgtacctcagaaaaggcgccctcccgagccgactctcgaggtcaaaagtggactccaccgtgtccaatatgaacggagaacgggtagaaggcctcccgtcgccaaaatggacaaatatttaaacgaggtcttcaatctcactcgagattcactcacttttattcctatctatcatagtcctccctcacaatgtccgaacaaatcctcgcaggaaagacatgcctcgtcaccggtggcggcggcggcctaggcaaagcaatcgcaacacacttcctcgaagccggcgccaacgtcgtaatctgcgatgtgaacgaggaacgtctgcaagcgacctcagccgaactctcccccaagggtcccctgaaggccatcaagacggatatcacccagaccagcgaagtggagagcctgtttgagacgctgattggcgaatacggcaaaatcgacgtcctcgtcaacaacgccggcatcatggaccacttcgacccgatcggcgatctggacatggagctttgggatcgcgtcttggcgattaatctcactgccccggctctgctgagcaaattggctgttcggaacatgctggcgcagccgaagccggatgggcgcattattaatattgtttctgttgctgggaaggctggatgggctagtggtatgctctgaggtctctactggatgatgatctgagattgactttatttaggtgctgcctacacggctagcaagcacggtctggtcggattgaccaagagcacggctgcgtactatggcaacaagggcatcaagtgcaatgctttgatgatgggcggcatggaaaccaacatcgcggatgcgtttagcaagggaatgcatatggggggctatgagaagatgatcggtgtcctcaatgccatccaagctcctcccgtcgacgtgaatgaggttgcagggttctgtgtgaacatgacatatggaaagggcgccggccagatcaacggcgcgaccatcgctattgataacggctggacttccatcgtcgggtagactacgactatataggcatgttcttctcctaatagtgtatatatgacatacatacatccatccatcaacagctcgaaaaaaccaaatcaattcaaaacacctcccatcacctagaactaagtaaccaacggattcggcttcggcggctcctgttcccacctctccacaccatcgggaatatcaacaacagcatgctgacaccaaatatgcacagccgtcctcatcatccccctatccaaatcctccaaacagccccccttaacattcgtaatcgccgaaaacgccggctgttcgcccggcgcaggcaccgcatcccggaagcgatgcaaaagccgcgcgccacaccccctgcagaaaagacactccagatcgcggcccttgagcgtgacgcgcgtgtagctgtccaccagacccgacgcggactccgggagctcgaagtacgggaatgtagcggtgatgccgaatgcggaggagctttggtgctggcattcggtgcagtggcagatccagagttttaggggtttgtcggttggcgtggtgaattggatctggccgcattggcagcgcgctttcattcccatcgtggtgggtgggatgcgactggtctagttaggtgaggggcagatatgggttttggggacggagttacccgtcaagtttacgggtggcgcgggtgggactgcaacgttgtacgggttgacatatcggaaggcttgggttggtatgttgttgaattagtgttatttcaatatacggccttgttattattgtgaatctgattatcgaagtcttacgtcgttgacggctatataagcacccactattcttgtagatgtagttaggtttcttcgtagaagaactaggattactacctacaatcaatgaagttttttctaccaatccacgttatgtaacctcaatttcattgaagggattatcccgagtattcattctgtagtgtagaaacaacctcgatcttaaatgtcaaacttaacccgtgtaatgctcaaaacccgctttcatcatcctcgcatctaattaaccttgaaatatctctttgacggaaacttcaaagtttaccctcactgcacttcttgataatagcaatagccccgggagcctcgtcccaagcttcatatgtaaaattcaaagccatctgcatctgttcgacgctcccgaccgaaaacctcataggcttagcgtccaaatgcttacctgggttcatcagggccggccagaaatgtgcgttcaatttgtggacatcgttgtacaaagcgcgaatttgcgcctttagtctcccgatttccacgcgcttgtcgcaagtgatgatattggggttattgctgatagtcgacggacagaagccgagttccggcatgtgcgtcataccatccggacgtcccatgtcttccaggagcccctgcagcacctgcaacaccttgaccttgactaaagtcacggccacgagatggggcagatcaatccacctgccgcagaagatatcgacgggctcgagcggattggcgttcctgacgtccaggtacggcagggtattgttaccccagtcatagtcgtcctgctggccggtggtcgcccaccacttcaggaaatcgtagcactcctggtcctgctggaggcggatcattaggctggggatgacgtcccgcgagcccatgttgtcgcctcgggagagatacagattgtctatcaggatgttgagctgtttctggagcgactcgacatggttaacggcggtcatggtatctgaaagggcagcgcggtagcgcatgtaagggcgggtctcgtggatcttccagaaatggccgatgccgtaggtaaagatattatcggggtggtcccgtaggacccgttcttcattctccatagtaatgcgacatctgcggattgcgctacacgcggacttgtgcttccggcggtgcgcggtctggtgttcgacgctgcagtagagcatcactctgcagccggagcagcggagaactctatcatccttgccgcatacaccacagcccgaggggagtggcattttcttcctagccgctgcagaagagggggataagagcagttcggtgtaggggccggtaaagggtttccagctctgtgaatgaagaccggaatgcttagggtgtaaatgagaaagggcgcagagggaagtattgggcgatgggaaatggaggaggtgttaggttatttattctggacattctttaggagttgataatgcctgtctgccttcaaagccaggccacaatatagttaggcgataacgtaccccaccagggcaaaacacagagcaaacgcgctaatttgcaatttgatatctcaacggttgtttgaatggtgtgatccttgcaatctcatttttatattacctctcgtcagctgagtgcgtttcaggaaagttaatatcacagcgactgggtagagtggagtagaccacaatgaagcttttactatagactactctaaatgcttatccatgtcgacgagcaatgaaatcaaagcgacatatggttaagatatagtattgcatttcctgtgctctcgattttacatctgctgatatccatggatggacgtgagacatgcggcatcgttgctatccactattccaagaatagctcgcacgaagcatagacgtttaatatgaaaaccctacctagactagcatctttcccatctagccctttgacaaagtacaccaccttcgcattccttcacattccttcacttccagttcctgtgccaacgcctttggccagcagtccaaaaccttatcgcactggtttcttgccactgacagcattactgcattacttcattgtgctcacaggcgcatgtgcatacatatgcagggaaacaatagtccaaaccttgcctctaaacacacagcacccagttcaaggacgagcagaaccgatataatcacaccaacggtcacgcttcgaagaaaaaaaaaagtcgaagatcgacggatcaccctgtggcagggccgcgcaaatccaactggcggtctgaatccacgacctccccccactcctggcgtcgtcaaatcagctgacagcctcaacccaccagccacactagatcagcactagtatccgtatcggtgtgcatcggacacgttcgatgtgaaaggcggtcggacggagactgagcttattaaaccgatactgctgattaatgtgattatcaacgaggttagggctctcattggtcgcggacaggagcattgtaaagtttgtcgacgattaggtttctcagtctggagtttcgggcccgagggctgcggggagactgccgagaagtatatgcggtagacaacataacatgcggtatggacttggccaagtgaatccttgtcgtggcgatggggcaggtagtggggggatggccttagccccggtctagtgttgtagagatttcatcgtcgaatgttatatcaagagaacagtcctgggctagacttcattcctatagtagaaatgtaccagactctttaactctcatcttcataacaagcttgatcatgttctacttcttgctaggcagtgcggtggcctataacctagtcatggttatctaccggcttcatttccacaagctcagtaggttcccggggcctcgtctcgcggccgcaagcgggctgtacgagatctacttttcggtctggggtccgggcattttcgaccacgagattgacctcatgcaccggaagtttggtacgctgtgtctggtatctccggggaaagatattggatctgatactttctaggtccggttgttcgtattactcccgatgaaatccacatccaagagccttccagctattccgacggttggatcaaaggtacggaggaggtggaacctggctaccaaggacgcagcgtccatagtttccagtacaagagaccgtctatcgcccgggtgcgatctctactttgggcgaaagtcaatgatatgatcaaccccttgatcgagaaacaccatgtggatagaatgcttagcgcaaggcctcgactatttcttatctgtccttggagtaagaagaaagttcagtcaattggagaaagcgaaagtgaagacggaggagctcgttctttgcagtgttaagtttgactccaactcttggacatctcaattctccgagtcgcatccgacgtctggttggaggtggagtcgaccaattgattccattgcatagtggaagatctgagagttgagctcgcacacggttaaccccgcgagattgtggagtttggcctttcttggctctccgtcgaggcgaatggacggcagttcccaccaacggccatgtttccatccacaatccggcatataccacaattcggggtttgtcggggttaaaaaaaaacacaaagaacaagaggcaattccggaagaaggccaagaaaagatccaaaggacaacgaaagcctttttttcgagctgaacgtcttggaagagccccgcttcggcgattctgccatttttaaagaaaaaaacgccagcaagccacttggtcaattcctctccattttattctcatctcctctctgcactgcacatacatctctgcacatacatcctacacctattaaatcatcatggtatgttgccgaacttcctgactccagaacaccgaagaccctgcagatcccaagaagctaacaaacatcaacagcctcacgccgactcctcctatttcactcccggcagctccaaggccgaaatatacgaacagctcctgctgtccacacaaggtctcctagacggccaacggaattgggttaggtgagtcagctccaacaaccctcgaaaccttgcaacctctaacaaccaacagcaacctctccaacgtcgcctccctcctctggcacgcctacggctccctcccagccccctcctcagccgtcaactgggccggcttctacatccgcgacgacaaattccccgccctcgcctcgcccgtctcctcgccgcccttaccaggcgcacccgggtacggcggcgtcatcatctcaactacatactcctgctcgggcgatcagatcctgctcctcgggccgttccagggaaagcccgcgtgccaggagatcaagttcgggaagggcgtttgcggcacggcggctgcgaagcaggagactgttgtcgtgcctgatgtgctgactttcccggggcatattgcgtgcgatgcggagagtcggagtgagattgtggtgcctattttggtgaatggtgaggttagtactttttccacttcctggtggggttgggcacaagcgggttttgggcaataatatatatactaacgttctcattttagacggtcgctattattgatatcgactgcactgagccttctgggtttgatgatgtggataaggagtacttggagaaattggcggctttgctggctgagcactgcgattggtaaaagttaacataatttggtttttataatggttacgacagatacggacttgggtgaatgatattgtacgttttatgatcgtgatttcttcctacgtagattctgcaacatgctctgctgtagtttactccttcctttaaaatgtacggagttgatatcttccgtgtatctttacattgacagtatggaatagggattgaaagtcctgctgtattgtattgtatgcgcaagtttattcgtcgcgaggattgaaaatgtaatgcaaaccagcaagccgaaatataaaacgatactcgacctgctcgagatatgtcggaaacaatagatacaatgcagaccaaacaccgagcgaactcatcacgctgggtggagaaatgaaaagagaaaacgccaagaccgagacggtaagaaggtatagagcacaaggaaatcgaaaatcgctaacatgcacaagaacatcacatattgagcaagctcatttgccgacgcatgggactcggcgacagagcatccccgtcttcgctgggaccgatgccgctgtctggaccagcaagcacggtgtccatgtcgatgtcccactgttcgtcttcattgggatcagtgttcacttccgcctcggcttcgccgccatcccagctcttctggaccgcgccgcgcgtgttccagcgcagagcacgctggacgctgatgaaccactcgttgttgttggacacgacggtcgggaatgggtactggctggcttcgacagtgacgtagtcgccctggcggagttcgacacggcccttgccgtcaaaggagcagtaagcggtggatcgggaggatttagggacggcaatgcggagaaggtgggagtcggagagaaccattgggcggaaggagagggtgtgtgggcatattggggtgagaaggatgcccgggatggatggatgcataagagatccgccggcggacagagaatatgccgtggaaccagtcggcgtcgagaagatacagccgtctgcttggacgactgttagcagctcgtcgtcggcgtagagctccaggttcgacacgtagggggacgggccgcggtcgatgacgagctcgttcagtacttcgaattgctcgccctcttcgacagcgcccagctctgctcccttgctccggtctttccgatatacggtgcatgtgaaccgcatgcgcagattgacgcgcatacccacctcgcccataacggcattgagctgcgatttgtaatcggcaaactcgaaatttgtgaggaagcccaggctgcccagcgaaaagcagagcacgggcggaaccacgcgctggaagagccacgatgtgaaaagaacggtaccatcaccaccaagggtcagcaccaagtcgaacttatcgggcgatgtccagcacagatccggtgtccagaaatgtaacatctgcgcaaacatcgggtctttctgcaacagccccggggcatcaaatcgcttcgaattgcgcagcttcgcatctacatagacattgactcctagttcacttccgtatcttgcggtcgaaagtagccactccgcaacttcccgggtcaagagcaccaggctgttatcacgcgccttagtaacaatcatgacatttcgcaccgctcgcttgataggtcgtcgctgtagttgcttcgacacttcacgaacaccagtcgctgtctgaaccagtcgcgaatgcgacagccactcgtcgtcggcgatttcctccaacaccttttttatgttgacagcatcatcgaagcgttggtgaaaataacatggcgattgcagtatcagacgcgccgcggcaggtgaacgatcgagatatccgctcaattgaaaattcgatagcgcagtcgagatgttctggggggagtcattgctcccccgccgtggtcggttctccgaaggcggggaagtctgagcggatttattcgcgagcatactcgacacagaaccggacatatcggtattattggtgataatcgtagcccgcgaggccagggctttcaaaattgtctgtcgcggtatgcagtcggtggacaacgctttcttcgatcgccggctagtcgacttccgaaactgctgtagtgttgagtaaggcagcgacaaggcggcttcctgaaccgattcggatacgtgtataggtagcacgttgtcgggtccagggagatctggcttggtctgggacaaggattctatgctgagggcatctcggaggagcgccggtctgggtggggacgatagagaggggggagacgttcgcgctgtagacagactcgggagtgtgtcagaccgtagatgatcacggctggacgccatcggcttatgcggcaggtaaataagatgggataatcaggaaaagtgctcggatgtaacggggtttgcggatccgaagtcttgagatgctgtcccccgtcagtcgtggacccaggtattgcttctagcgtattccacactcttttttgggttttttcaggggggattccttttcttatttggtataataacgacaaggatgatggactggagtgggttgggattagggtagagattgacaagaattgggattggcaaggcacatccaagaaaaatgggattcctgtttaggaagaccacggacctcgatcatcacattaaaacacgagattatttagattgcttcctgcgattcccagattccccagataatcctctcactggcgagtctactagtcatcgccaaatccgtacaggcgcgcagtgcgcgcagataatgacgtttacactgtcatatcaatctatcggcaataggaggctcgttaggatgctcatagatcatgataggtattttatttctttggatcttccattctccgtgctactttgtgcattctttgccagaatgtcggttaaacatgtattcctcaaccccgactcgaagtgggcatagccatcattctgactgcgcctgggagtctgtggttctgtcaccgctaaatcacttggcaagtgagtgaccaaacgtcatcaaaagcagacagggtccggaatccaacaattgaggaacccgagaacaagcctcacgcaaggctgtcgcctgtggcagtgaatgaagcgtgttgtacatgcagcggcagtcaggtgacggtgccttaaccgggtggtactctatccactgttttgtggcaccgtcgtatcctagtcgagaggggcgatatagcgagtgctgggaagtcatgtgcacaagagaaggggcccaggggtgaccgcgaccttacacacgtctcactaactctccgcaaatttgccgggcgcaatccacctcagatagaatccagcttgtaggcgtagtcgctgtagatctggtcctccacggtctcccggatgaaaccgctcacactggcgctggccgttccttcacccatggcaacgtcgccatcagcgctggcggtggtctcgccctggcaaatggagagcgcgcgctcacggacatattcccaggtatcaaatccaaaccgaccctcgctttcgttgaggagaaggtggttcttcgaggagaaggcaaaaacgtggagggacacagcagccttggcggcagtcggagaggggtcccgcacaatatcaccatcctcagttacaccaaggagggtcgcggagaaagtcatcgacagaggaaccgaggcggagatcatagcgagcaagccagtatgtaggagagccgggaggatagtaaggtactagatagatcagtctgacagttcaacaagcagggcgaatggaatctgagatactcacattgtcaccgcgtgccacgttctctcctccaacaatagccagagtaatgaccacgccgcgacggggaaagcccttctcccgtccaaggacgattttccctagcacagaccgcaggattccttcgatatatctttcaccgacgccaccagttgtcgtaccaggtttgacaaagacctccacagtggcttcctcgggcttcaatgcgtcacggcgtgctgggagctcaatgggcccgttgacagcgcccagaatgctgtaaccggtggctgggcatttgtatgacgccgaaccatcggaacgatgtaattgtgagagggatgctatcggaccgaccatattgacgatggacagatagaaagatagaaaattaggaagccaaagttgtgtttgaagagcaaagtagcaaagttgttctgccactgcgatttttcatgtgcgggccgcttcttgattggccgccttagctgcgattgtacttggtactttgtttgtcgctggaccatgatatatttctgaggtatcgactactttgaggtgtcaactaaattgttgctttctttcccttatccctactattcttactattcacctccagactacagatccatttgatccgtcaagtggtctgagacttattggagtttcaatcaacctctcgaagataaccatgtcttctcatacgagcacttactactgtccaccatgacaaccaaatatgtgctgtgggtaaaccaacggaaattgctcttcatgttctagcttcgtgcttttgatttttgaaagacattgtgagcaaaaggcaacttcaatcgcatacagaatatccattgattctgccatcacaaggatgaccgttgtctatacaattcacaacatagaatcagaggtacaccattattcctcatctcgatattgatgaaacagaaaaccaaacccacgagacacggccgatcggatggcgggcaaggactttgcgtgctatgcatagtatacaagatacctctggccgatgatgagtcttgaatatccccgcgaagtcctgcgtaaccaggcctacgatttgagggcctcgccttgatatcgttttagcagaactactcatttgatccccgtacagtcttaaggagctcatctgacccattcccattcggagtgtccctattacttcccaggctccagagcatccacctccctttctaccattgggcagttgttagttccttctcgattgccaggatctggtaagaattgtaggctcctgatccttccaggatgtattcgtgatgaacctgtagccaccgcgtagaatttgggccagtagaccgtccatatcctcctgtttttgcgcctcggaggtaggttccgaccccttcctgggtgatactttgtcgggcagcctcctgacggatcgcctctttctcaaatttctcgagatgaatctataagggtccgtttgtcagatgtaatttgtactggaggtcgaaccggtacgcctgattgcgagctcgctcctcctcttcgcgtgcggaccgaggcagtagccgtgagcgtttgatgtgcttatggacctttcctttaggtgagatcgatggagttggtccctctagatcaggatgaaccgatccggcgcgatagcaaccgatcctgtctcattacggaagatggtgtcaatgatttacctgctctcaaaagggctgatgttggtattgctatgggcaaaatagaggctgccggtatggttttgacgatctgagataccaaatccttctcggtcttccacctcctatgcattgggaggggccttactctagaggatgctgagatgcgggcaagattggtaattcttaagcgtctatcacttagtactaacgcgagcatggaactgaagtgatctaggaatattttggctaactatctaacaccaagttggtcatgaattgctacctgtaaggcgttcaacgtgctcttcttattcattcattttctcgtctatatctatttttccagcatgaaatcatttcatatatctttaactagcatgtagtttcgccggggcttaatatgtcataccctaaaatgaaatgaacatggcaataaatctaatgacatctgagaagtctttaggcagtccacgttcaatgtcaactactaagcaggtcatcgtgctaggcacctacatagccccggagtgcgtgtccatttatagcttgccaatgatttactgatcaacctattcttactctcgaatcccagtccgtctatcccgtcaaggacaccaattatctctccaggtatcagacaaggctacgtatgttttatgtctccacgcatgttttttccctaaacctaatgcagacacagtaatccaattggccatcggcctgacctcggggagctaccccagttgccgatgtcaatatcaactatcaacctggagtggggtaaagaccgttatgaagaatttacgtttagtcaacgttaaatgatcagttttgatctgcttcccgagatgtgtttgaacaaaggttcgatttagaatcatcgcaattggtttggaactagtctgagctggcaagagaacagttggaagtgggatttgatgcgaggatgctaggggccccctgtacgaaacgcaggaggatggctcgattggtaattagatttgagataacgaaggaggggcaggtgacaagtgggcaattcaaggctgttttaggaagattctacattgacaatgtcaatttcaactaatgttaatgggaacatacgacttggatgcagggataaatcaaactcgattcaacaatgtgggaataataaccatggcttcgtgtttctctaatcatccggtagacatctagtagtgtcttattcaaggggtctcggagacattgtagaccagcttctcgccgctgaccttgccctccttgagcagctttagaccctcgatcacacccttcagtccatgctcgccgaccttggtggggtgggccttaatctttccttgggcgagcagatcctcgacaatgggaatgaacttctcagcgtgagccttgtcctccggcttggcagggatgggcgtatcaccgaaagagaatgcctcgccgatagtggtataagccagggtgtagcggtcgttcacattggcacggttaatcttgacgctcagcaaagagctgtactcgccgccatcggtagagatagcattgtcgcaaaacgcagcgctggagtcgagcgagatacagtcaaacacgagcttcaggttgttatcagtatccttgcgaattttagcgggggcttgcgggtccttgtagtcatagacatcatcggcgcctaggctgcggaccaaatcgaagtggtgcggcgagcaagtggtcaggaccttgtagcccgacagcttggcaaactggatagccagggtaccggtcgcggtggagccgccgtagatcagaatgggagtggcatccttgatggggtcggtgggaagggcaagcttcagactctggtacaggccctggcccacggtgttgatgcccacaccgagggtggcggcctcttggaagctgatattctcgggtatcttccactgcaagtcgcccttggcgacgatgtactcggcgaaagtgccgtcctcgggctgcactgcattggagccgtgcacgaagccacatacgcggtcaccctttttgaaatcctttttgacatccttgcccacggcctcaacggtgcctgaatagtcgcatccgacgagaacaccgggaggagaaaggtaggcaacgtgcttccagtcggtggggttcaagcccacactgacggtcttgacgagtagatagtcatcgcgaagcttggggatgggtcgatcagtgaccagaccctcggtcttgggctgagcgatgatgactgccttcatgatgggtagttgattgcggagcgaagcgaagcaattatatagaatgcagttgagaagagggaatttggagaattgggaggatatagagtgtgtgttagttaaatagtgctctgattataaatgctctgattacaaacctgaagtatgacgaaaggcaatcactgatcgtcacaaatattgtaccgactccgtctcagtctatccgccatcctctctacacagcccttggtgaacagcgttgcccctggaacagttcattgttttattgttgtgccacacatgccagatcaagacgctacacagcttttacgggagaacccccatgaaattgggcatctttcgattcaggcctttgatactctgccttggttcagtctcttgaccggtcttcgatattgcacagggatcattgacatgaacacgagtcgtgcagccaagattggacgcattcagggtgttcatattgcgtcatccattccctaaaacgaaggatggctttggcatatatgaaagaaacatgtatataccgtagcccaatggtctattcttgatagaggaatggtcgactttttaatataatatttgcaccaataggcacattcaacgagcttgctatcaaaatcggttaactgcaatccgatttaggaatcaagtgccagaaagacatataccaggcattgatagatgaagcagaccgagagacaaactaccagccgatgaagaccatatcttccagtctctcgagattttatattgagatgtctgacgccagtataagtatgaggtaatgaggttcgctagctagcgcaaggggtatcagccaagaccacgagcaaaaacagggttcacgcaatttgagaaaaaccatcagacgtatatatagctattcgagtccaaaccaacggattcgccgtcttcgaatctccattcaggacaagacgtcgggggttgggatatcgcggggtcagaccgtcaaagtcggttagtgtacgttagtgcttatctgcatagacgacccctcctcgacagaattcctcccagacttctatttcaacttcaagaagaagacaatcatgaaggttctctgtctccacggaaaagggaccagtggcgctatcttccgctcccagatctgttagctcccccgcagtcccaaaccaactctccaactaaccgcgcccagccacgttccgctccaaactccccaatgacatccaatttgatttcatcgatggcccatttaagagtgacccggcggcaggcatagatatcttctacagtccgccgtactactccttctgggaaaatgatagcgtcgaatccgtccgagcctcctacaactggctgactgagcacatcgccaagaacggcccatacgatctagcgctcatgttctcgcagggctgcgtgctaggctccagtgctctcctcttccaccaggaagaaacaccgcatctcccgccccccccccaccccgcggggggggttnnnnnnnnnnnnnnnnnnnnnnnnnnnnnnnnnnnnnnnnnnnnnnnnnnnnnnnnnnnnnnnnnnnnnnnnnnnnnnnnnnnnnnnnnnnnnnnnnnnnnnnnnnnnnnnnnnnnnnnnnnnnnnnnnnnnnnnnnnnnnnnnnnnnnnnnnnnnnnnnnnnnnnnnnnnnnnnnnnnnnnnnnccccccgccctttgaaggggggggtttttatctgcggtggcgcctcgttgagcgtgctggaggagatgggcttccatgtttcggccgaggcgcgcgatcgggatcttgcatcccgggctgcgctggctcaacaggcgggctcgtcggcgctcttggctcagggtgcggatcgctggactgggcttcagacggtaaacggcgggctctcggaggatgaagtgcggaaggagattactagtccctaccgcattaatattcccacggtgcatatttacggctcgaaggatccgcgctgggcggctggtgtgcacctttccggtatctgcgaaccgacgaaacgtcgcacctatgatcatggtggtggacatgaaattcctcggacggctgctgtgagtaactcgatcgcggaacttttcaagtgggctgctgcacaaagtgaaagtggaattcagtgaggagtgaattatattatgtcacactttatttttttcaatagatgagatagattataagtggaaatgtaaagttcggcaaattgtattctctcgagaggtagcgtgggcttgaactaagatatgagagggcagagagatcgacaagacccaatatttggctccacttgccagccttggtattcccttgcctcgtgtatatatgtactcatcatatccatctccaacactccctattaatagattcaactcgatcggtaagagatttccaaggttagccctaattcagccacgctagccaattccggcccactcgaaatttcaccctctgcccatattccgcaaaagaaaacgaattgccaatatccatcatgtcatgggatgaaacgctcaagctcacgcaggccgatgagtccgaggagttcaagttgttcgaggcggttgtcaacggggatgtcacggtcgaggatgccgtgcaatgggtcatcaccacgacaatggacagactggaagactacgggccgggaggaagcatcgagaaagccgacgccgtaacgttcatagctatcatcgagctggctatgcaaatcgatacaacccagtatggaccgctggttgagttcctgggagaattgaagctgtacaacgccgttgattcgtcaacgggcttgatcctaaaaacacaagatggaagcagagtctggtcacatctgccgtcgctgaatttctgggtcgccgaaatatggacagaccggatgacacgtaagcgaaagcgaaagcgaaactgtttctgtacttttcttctgtagtgctgacctgtcgattcgcagaaatctgtgacccggatatggaacccgatcagcagatcagatgggcgaagctcaatatcttcctcgcgcaagtgacgcaggcggctgaggttgagtatacttccctgcaggtgtcgatcagcgatgctatggatgtatcgcacatggcactctgtggactgcgtcatgtgttcgaagagcgcattccttctgaacatattgcctcgacggcgggtctgctcggtgtgtgctactggctaatctgtgccggtgatagactctgggagaatgtactcaacggccgcaaatacaacagatatgatggtcgaccgggagaattgtattcagatcgcgggtggaagggctttgaacgcgaaagatgggatatatgggtgcagggtcttcgtgacgcgaaggccgcttgcagaccgggcaaggaactcgtggaagatttgatagaccgggctctgtccaaaatagagcgtgtaatgagtaatgaaataccatccaattaagcatttacaaactactacgttgtaataatttacacgtcggtttcgaaaacaaacattcaaaccggtttatgaccgactcttaaacctcacagggtattgattagagttcaaacattatatatagaaagacgccaaacacaagctatctagaaacacaagtcactaccatgaaaaagtctcttcaaacagatcaaccgtcttctccccttgtacattcctaacagcctcccgcacactatcacccaggccaccaggaccgcaaacgctaaccgccatcgcaccgatctggtcttctttttctttctctagcacggattgcatacacggcttaccgtggtggatgctgaccggcacgccaggcggagcacattgcatccacagcgaatctggctgagggacatattcctcgacagcatccttgtgtgatgtgatgtggaggctgatggacaggaggaggcgtgggaattggaagaaggagtgcccgttcgagtttattgggcttagggattcgtgccctagtatttcggccatgaatgtttggatccatgcgagatggtctttccatatgttagtgggcgattatttatgtggaacaggtgggcctgatcataccgagactgcggacgatccaaactagatgcactttgcgggtagctgtcttttgctccgtgaacgtggcgataacttcattcaaatatgacatcgggtgggtaatgccgattcctccggctatcaataggagagtaccgtatgaggtgagagaatggataccacctgtgagatgttaaacatgtttcaaatatcaacaaccaatgggtaggaatccataccaaatggcccctccgccaacgccatagcctgaatccgtccctcggcggaggcttctgccttctggagcaactttttcgtgaatccgtcttgacccttgattagaacagacatggttgtcgtcgccgaggctccagtaagagcatccatagagccacccgagccgcgcttctcgttcgtattcaacgaacccgttgacgaccacgcaaccgtaaagggatgcgaagtccacaagcccagacacggcatgtagaggtacatatactgcccaggccggaaacgccatgcgcgagccacggccacatcaacacgagcaactgacccagacagaacctcgacggtagcagttgtaggacgcgagctgagatttctccaaagcaatatcccaagtcgacctgcacgatccagaccccacaggatcaaggtgcaaagcagcacacgctgttgcagtaggttttgcaggtgataccagagcgccacgaaggaaaatacagccagggctatgtgcaggtgaagaaatagttcgtaaaaagcatgtcgggccggcgacagagattgaacgaaaataaaaaggaatccaatgatggcctacggagatatatgttagatggccatgtgaagtgctggtgggctgcatcacataccagaaggccgcatataaaaagcttcttctgccaaataacatatagaacatagtccgtgccatctgagttcaaggtttcatgttagcgaatgatagccgtatatgtgcaaggccactcacgtgtagaagccttgtcagccaacacggcgctcatgtggatgacggcgttggctgtgatcacccgtcccacccaacgatgcatgaaattaaacgtatcgaacgagatccccaacagctggactaaaggattgttgcgtcctgcgcctaggaccaagcccggcgtattcatgacggccagatggcccgcggcgtacttaagctggaacatcttcttggagtaatcactgagccaccaatcgactgtcacaagaatgaagattatgttcaagctgatatagatcagcaagcaaatcacttccaatcgtagcggaagagatcccatatgaagcctcaagaagcggaattcgcgactatggcgattgccccatatcggggcatacagcagatgccttttcagggccgccttgaaccgacttgtctggcacagctgtgtctggtcgcttccttgccgtgcagcctttgatcgtcgacgatggctgatgcgaatgacagtcttccagacgaataaaaaagctatcagtccgccgacaacaaacagagggaccgcaatcgtggggttcataggcggctccccccggccatttcctttgagttccacacccatcgtgccattaaacaggcaaggggagctcaaggtcaggtccacaggcacagggatcgtcgatcgtcaaccacaatgaacagagttttaaccctcaaggattcaagaccaagaaagggaggacacaaggtttaaacgggatagtgttataaaggatactcgggtcgcgtggggaaaaaggaagacgtgggcatcattggcgttgtattagtttccataccagctatagacacatgccgtcattgaccgctggaggccccgcaagtttattttctgtgaagacggacgaacccaccctcacgtttacaaggcaagcgtagacaattgtctcacatggccagtgtaacgtcgaaacgggcgaaacggatcttggcaacgctaattctattctgagtggagatgatggacgaggctgagtggtgaggaattccaaatatcagggaagtgccctgtcatgaccaaatcgaagggcatgtggacctcgacatagtgtggcggactgtgtaatctttgcatgtttgggtgttctaagaacacggggataggcgtggagacggagccgctactgttcggcaatccggaaacggaatgttgatacctgcactgctgtcactttcagcattcctcgtcccaatcagtcatgagataggaacaaagagatgagaaattcaaaactaaccattttggttcctagagagagttaatttcgcttgatctttgtagagcaattgtctgaatcctcaatagcaagatgcttaacgtagactcgaaccccggacactcggtccagtgggatgcaactgcaacattagagacaatggtcaagttagaggaagctgtagcgtagtagtcttggaaccttatatatatgacgccatagtacactatggtcagacttgcaggcgcaaagacttctgaattggttcaagagattctaggtagaggtccgtgtgtttagaatgacaccagatggacaattaccaaacgacttctttcggcctccatgcccagtcagtgagctccattaagccaagtctcgcaagcatcgctaagcattccgcttcagggtaagttgacggtcgtagcggggctgccccaggaaaactgagtatgtcacgatgtgtaagagaaaggaacatgatcatgatcatgatcttcacggaatatttcagatgagtcaaagttcagtacctagtggcgtgactacagagtccagactacaggtcaggagtcaggaggtccacggcaatgagattggtggccttggcgtcctggcgaataaagttgatgccttacattccagtttcgttgcatactacttagtgcactgtttccagcactcaaatgatgaggcttatctctctaatgtactattaaaccaccgaagctgatacaggcaaagggcgacgggcgaagttggtaattgtcttttctacttctgttacatcctgaggtcctcaggtctagattgctccaaacatatataaataccacatagtacataccaaaacgggataactaaacggtgtgataccggaatcatcagatcccttgagctgtgacctctatggtggctatggcatgccgacaatggattgttgcatgtcagaaaggagacaaattggaaacatacgcaaatctcgctgttcttgtagagccatcccctgtaaaaactgattcctgagaacaggctgaatgcagaattgttctattaggagcctaggctctatagaccagagatcttctattcatacagcacaaatggattcattcaaatatcaattatcaactatgttatgataatgccattctagttggcgctagagcctgtacaaatacgctatttctggggttattccattccccctttttctcatgaccaaaaggccttgaccataaccaattagaaatacaaaaaccgaaaacgccgtcattattgggtttgcataagtgacaccacacccgtcctaggatcattagacatctcagctggggacctcctgtacattggaaggggcatgaggtattggccttccatcttcttcaacagagaggctgccatacccagtgtcgttgctagctgatcgtgcccggcggagaggcggtctttcgacaggatagtcaatcaggtcttgatcggcgtcgctttcggatgactgagattctcccttgcgacgacgggtcctgcgtttcttagacatagccctgtcaggtgcggtgtgcacaaaatcttcaacattgatgcctgcattttggcagattgctgtgcacgagttgacaatcacctcgacgagagtagatgaaaagccgtagaaagccggggtgtaggcatttcgggcccaatatatgagctctgctgatacccgcccgagattgggaatgtcacgggggcagagggagagcttttgattcggacggggtttttcttcggcttcgtcgtctgcggaagagatagccgcctccgaggctggagccgaaggggatgaatcggatgacgcaatgtaatccacgtcagaggcgaggaggtgtaggagatgatagacagacgagaaaccgatgagagaaagctcgactggatcaatcggaagctgattgaaccaagacacggccttctccatggtgaaggagtcaggtagtgaggagacaccacctgtggaccgttcggtgacaatggtggcaatcatagcacagcgcacggcgatggagatttcatcccgcacggaaacgggcagagaggaatcaaggaagttggatgaatggctgtgacttccctttctcttctctttcggtagcgcggcaagaaccgccccaacattttcaatgcggttgtgctcgaagaaaacggctttcatcacgagtgcccgagtatgcgcggcggaaagcaccggcgccacatcaagggacatccgaatcttctctttgaatgcatcacggcttgccttggacaccgggcccttcccgcttgcttcgaaatagttgagaagagcggtttggagaagatgactggaccaccaagctgcaagtgcatcttgggaacattgaatagctgggtcctcatccacaacatcaagcagcacttcgtcatcgccagtaccctcctgggttggtcgattccaggtcaggttcacagcacgctggataatgttgtcaatcatgacatcctcgcaatccagtttgatcagggcagcaagatgagggggaagctgatcagggtgaccctcgggcagtgcggaattgatttctcgagccacaccccactggaatctggcaagagctcgcgcaatgtcgtttgacacatggaatgaccaggagcccgcctctccgacgttccacaagagaatgcggacatgcaaggcctttattatcattcttgcgggagtacaagggagtgtgccggcagcgaagatagtgagcacaaggcggctcttgctgatctcagcatctccaccagtgagttgagcatcaattgcgatatcccaagtcttgactcgtcccttctcatcctcctcggtgattccggtggcccatgagtagactttccatcccatgaagcatcgtaagacgtattcgaagcatctcgaagtaacaacataccactctcggaagaatctatgacgtggaacaccgacccgttgcatgctagtcagccaagcctgccgacggaaatcactagatgtaagaggcgcagccgggccctcagtagccaatttggatgggccgcgtcgggtgattggctgcgcattgaacaagtagacaaaaacgataaaggcactcccaacgaccagcgttgccagaatgaggaaatgcgaaaatgcacgtgcctgccacgagtaccagaactgcttcaggtagaattcacaatgtgccagtgtgggggtttggaaacggccgagaagactgatggggagtgaaaacaggcccttcgactcggactcggaatcgtcagagcccataccttcaagaaccatcagaccggcaagagcacccagcatatatttgttgggcatccttgaacgtcgagtggaggtatcttctctcgcatactgcggttgatgagatgaggatgatgacgaggggtacttgatgtatgattcagcaaagacaccttgctttgccgtttcagctcgcatacgtttccacgcatcgggaactggaaggaggccttctggggggttcggagaggtgggtgaactctcgctggacacatcttccgcctgagaaaagacactaggtgatgtaccggagttcgagtccgtcgaggcgtagttgctgggcgaggacacagaacctgaggatgtggcggcctgatctgctactttatcagcctggcggagtcggttcttcaagtcggtgttttcgtcttccaagcgttggttacgaatttccagatgtttgatgtactccgtcgctttcgacaaaatggatgctttgttgagcttgttggcagcatttgctccctccgcttcgtcgtcatcatcggctgagcctccattcggattcttgggcgaccgcaggctgggaacactgtcgcgaagttcggcgattttatcgttcaaattggcgcgataccgcttctcaataacgttgtgagctcgcttcttggcgggcattttcttgcccggctgcactggtccagtcactgtggtggcatcgtcatcgctgcccgtctttcgcttccggcttgtgccaacactggagattggagacaccagaccgtaaggttgctgctggctcgtacgatttggtccaggcaggcgatgggtgtacccaaggttgttcccggcattgggctcggatgggatttccatcaagccgagtggaaggttaggcgagaagtccccgtagttcaaatgacttggggagctcatatctgtctgcggggagatggatggtagatctatagatgaggccattggcttttgatctccttccgagaacattggttcatcccatcgcatccactgggtccaatcctggttcacattctctccgacgggatgtgtgaacaaatgaccatttcctcgtgtctcatccccaccagggtttcgtgaagaaaatagctgaaagtcattctccatattaggaccggacatcttggacggctgggtcctcggccaatgtctaagtccgaatgagtattgggcagtctagatagttgtcactgataaacatgttagtttcagtaatacagaaaagccacagctcctttaagagaacagaatctagctgcctgcacagccataggcaagcagaaagctaggccgagacaggctagcggcgatccctgagagcattaaggaggtagatagatgatactgactgggttcaacttcaagtgtaacgctcgaactcaaatgcacgaagcttaatagacgtgaacgtactccgtgctttctgcaaggtgagatgtaaagactgagttgcgaggagggggatgtgagtgtaacagtcacgggcggtgctaggcgattggaggagcagaaagcaggggtggaagatacccacatacagacgtaaagtacttagggcccaaggaagcaagtggattcccaaattcgttggcgtcaaggtgatctccaagagaaggtggatctcatgcgccttgagaaatacgagaaacaacgtaatgggaagagacagccctagagatacaagctattgcttcaaactgtgattaaactgccagagtccccatgcatgaagatcaggggaggttgaatggccaggcagccggggaaggcagtttcgtcgtatgatcgcggctgaccgcacttccggtcacccctgacggtatcccgggcgttaattacgctgagtcatgatattttgtgcgtgtaacaatgtaatttgtgttttgtgacagtaaccaaaagtcaattatcattggtcatcaatatccccactttgcctcctcctgcaggtgcccaagaacgtttcgagcttcaacttcttctcttctttagatttctttgtctactgcgttgtatcttcttcctaaccttttagattcacttgctgaaacaaagcgagccgcatttctcgttttcctcgcactcgaatcggctgaatacgtccgcgcgtgatgtcttggcgccccgcgggtaggcgacacgggaaaaaatgggcgtgttatgatcttatctgatcgtgctagtctccactcctgcctcgtcggcagcaccggaaccagagcaacggcgcaagaggcgaatggaatcaacaatactcgtactccgtacaatataggctatgtggatctgaatccggtatcgcagtccacatttattcacttcgacagaagcacatggctctcgcgaccaatttctggaaagctaaatgaaaatctctgtctgatgcttcggacaatatgcatcccgcgtcaaattccattgaaccgccgactgatctcattattaccacaataagctgaaatatgttgactgggtaccatccgggcaagagattgtacttgatcatcccctcaccgactccttcaatacgtcaccgacctcctcgtatggagcacccggcttgagcctctctagcgcattccccactgtgtattttatcaatgcagagcacagatttgatacataactcactgatactatatctaagttagcacgtggtcatttgttacaaccaataataaaacgggttgcatggagcctagatcggttgtgcgggcccgattatgagctgccaagctgagatgagacttgtgttcacaagggtcgcctttcatagagttgagagctcgttggtgggaccccgtttgtattgggtggaagttatagccgttccttcagaaaaacctggctggattgttagagttacattttcaacaatttggccgacatcggcgatgaggtcgccatagggatcctcgatgtcacctttgagaacaaagccacaactgcttcacgtcgaaaactttcatggagttccggggatcaaatatggctaagagtcctttgaagacattatagctaaggccaggctctttcgcggtctttgggggtatttgtactgttttctttatgaaacaaggtgagcgatttgtctcaagttttcatatattctacctagatgcgcaagtaatgtcggggctcttggtatttgttcttcactcagaatctcgtaccgttcttctcgactgcctagtccccatgaagcctatcatttttgattcagacttctggccgactcttgagagctctttagcgaacgagccgggtcctctctgtagtatgcaggatatttggggatggttgggctcaggaaattgaattgagtggtagaaaagatgcctctgagatttcaaaggatgaaagagaaggtgtaacgtatagagtgatgggatactatagatttgatcggtattactaccatgaacaaaatatgctaaagagcactccatttgtggggcattatacccttctccaccttaatggatcgacgtctgtgctgccgagaaaggatgaaaaaacacatttgataggttggcattcaggtgaagagaggggagaaaataagaaaatcgcaaagtggagggggaaggcagagaaactttgtcttctcgaaacctgccggtaccgatgagttttgcatagcattcaaaataggactgcaagataatcttccttcaggttcccagctggattggtgtctcatcaattcagttgcacgtgttccaaggcccagagagttctcaacggggtcaataacatggggaggcgactgagaatagggaccaatctgaatacttcacgagaaagaaagtggtagacaggctgaggactttatggcatcactggtgtacaaacatacgcgacgacaaaacatcaacaacagtatcctcttctccaacctcgtgccactggctcaaggattgatgaaaagaaaatattctccacgaatggaggtgccaaataatacgtctgccgataacacgagtgccattgaacaaactgttccgccgcgtggtgcaatgcagggaccagcctgtggtgaactgtcatattgatcacagtcacccaaacatggtacgatgaagaagaaagaaaaaaaaaatgagaatacgcggggaggggctcgctatataccatttaccagaggactgcgccacaatagaatgtttgttccttttgtatcacacgcctcgattatccttagggattcctaagccacagagtactgccgtgcatttgtgaaaattctaaagcaggttagttgagcggtacggcccgccccgtcgatgtgaaaaccttatatctccgtgttacagtagaagtcaccaacgaatttggaaattgaggctagataggcgcagaagagcagagaatgatatgtctcctaattgtattgaacaaagtatgacttatgccgttgccgattgacgacgtgagacggcgaggactatacatcatcatcatcttccccagagctttgcttacacacttgagatacaaagcctgtgaattatgatggaaatataccatggtctatccaacacaactgagatctggtatcctactcgtgaccccaccggctcatcaaaggacagcagctgatagggccagtggaacttgttactctcatgcttttttaccaagcgcaaagcccctagagagaccagcttcgacacatgttcagggctctcgattaagtgtgcaagatctctacgaaccctgcctgtgctgctcacatccctatttctccacctcaggggaatccatggagtctcggaaccatgaaatccatctaccgtcatattctctacttcgaaccagcgatccttcctattgtaccagaccaccgacactgcaatcgttacgcgacgagtaactactgagacaatgctcgcctgaaaggaaaggccttccgtcgttgcttggctctaatcgagcgatgcacaaatgatgtcgaaattgcactatgtatacagtgaagggatttctgtttcatgtcacatttgagaaggagaatatggcagtcatagtctcatttgtcagttgctcgtgatgagaggatcagcctggtggctgatcacccagaacggatataatgcaacttggccgaatacatcgtgcggggggatataaagagatagactccatatcggtgtctggccgatgatcaggccaccaaggtcctaccggatttcagtccgttcaaatataggaaggaatgtcttaaaatgagtaccttgcgatttgctactgttacttgtctcaatcacttcaagtcaaacactctttcataatttatttcttaaatatagattcatgctttatgatcttgcgagagagcactctatgataatgtgcatacatgcacatatcacactaaccaaattactaactaaaagagcaataccgagactgaaatgagctcaaccttcaatctcgactaggcagcacgatgcaaatttagtgctgcagggatggtcagtaacgagtctacaatgtgctagagacaatcaacttaccgagatatcttcccatttctcccagccacgcccacgaacctgagccagttcttcatccgttagctgcttgccggtagtgaagtatcctgattggatcttggcatcgatctcgactcttgaatcactagggatcatctcatcggggatagggatgcgctcgataatattgatgccggagttcacgatggcgtcgtacttcatgttggacattgacagcatgcgatcgatcttagtgatgccgagccagtgcagaatgtcgggcataagagcttggaatcgcatctgcaggggatgaggtcagtatatgcgagtcacgtggaatgatgaggatacttacgtcgcggacacctgcaatattctctgtccgagtgaaatacttatcggcggtgtcgccaccacgcttgcgcgcattgtacacaagatacttaataacttctccgagggctcgaccttccttgcggaagtagattaccacaccactgccgccgttctgtgcctctcggattgcttcgcgaataccgaacgctaagtatggtcggcaggtacagatatctgactggaagacatcactaccattacattcatcgtggacgcgcagagccagtttgacattagggtccgcgatccgctctggtgggccgaagatgtacacggtaaggcctccgattggtggcaggaatgttttcagatcaggccgagtgataagctcagggtagctgccaccggtatgttcgaacaaagtccgacgaagagtgccttcatcgacgccaaatcgctctgccacaccgggaagataccagacaggctcggctgctactttagtgacacgcacctcgccggacgaatcaaccaagacagacccgtccacctcgagcaggccattcttgacgtcatcggcaatctccgcgagtttcatgttcgcccgagtgactgccatcgttggacggatatcccagccagcctccagctcttccttgaactggttgacaatgtcatggccgtaaggatccatagagacgatctttttcttatccgcccaggcaggctgcggggggaaattgaaagtcggctgagaattacggaaatccggtcggaaatccgcatccaagtcaccagcggcaatggcaagggcattgtatacgctgtaactgccaccgtgggcgccgatggcattgcggcgcttgacgaggtttccactgcgggatacaactaccggaccccgggatttggcgtcgggagcgccccactccagagggacgggctcaatgccgctctggcctgggtacgtggtcaactatacttgatatcagcatcatccgaagacattgaagtcagcccagatctgatctttcttacgataatatggttgctgtatcggggattggggtcggcgggggctgcggaggctgcgggagctgcgggagctgtagatggttccatttgtacgggcaagatattggtgacggattctgttttcaacatggtaagagaatatacggtcctggatgattaccagaaggatgaagcgatatagagaggttacaaagaaaagaaagagggggaaagagacctggaggaggggaagtagtcggccatgtgacttatcttctcctcacgttatctgaggggcttatctgcatacaatcaaaaggacgaccggtctcagatagcacgtctgaatgtcttggctttggttatcatgtagtatcgtgtacaaatcgaatggcggtatatggtgtacatacaagttctaacgatctccctagcttctatacggcgtctccaccggtttccaccggagttcttcggcgttcgatctaactggccggagttagcgaacaccgaaattccctaggtgattgcagtttgccttgaccacggagtccgtacattaagcaggatttcctgtatctccccatgaggtaaatgctttcgttgatttcaatgccacccgctaacgacgtgtacgggcagtacctcgcgtcgtcgcaatggcaaaccagcctcctgcgagccgtgtcggagagacaaagtccgctgcgaccatgcattacctgtatgtactcgctgtagagatcgtggggtctctatgcgatgttactatcaccccgcccctctgacgagggccaagggtcgccgtatcttcccactggcagagggggtcccctttgatcgacctccatcagcaaggtatgttaattgtaaattcagttctttgtttcattctcaagcggtctacaccattgagttcccagcggccaattaccgcctcaatttacctccatagatatcaatatatacatatcagcctcttataattgctgtttcccaggaaccctcatccaaccgagacatcactcaatcccgacgtgtctaatgcgggacaagagagctcttctgggcgcatagcccgtacccaaccactgctttctgggtacttcggccccacgagcttcgtatcccccctaaccgaggatgtggacttgggccagggtctgggtctggagattgaatctgcccagagagtcctgccaccctactgggtccacaagatctccgaagtactattaacactcaacgactttcccgcagttgaggccctaatccgtgattattatgcactcagccaaagcgcgattatagcggcgccattcgtgctcaacagccttgaaccggtcaaatccatgtgcaaagaaaacatagcagaccgtaatcttaccgatttcacatcttcactgacagtgagcataatacaaaacacatctgagattttcgaagttccgtctgcaacacaagggcgagacttccacaccctatttacggggcccgcgatccgcctggagattattgggcttctctgcgccctcgctggtcgggcaagatatctagggctcgcgagtgacaggttcgatgacggccgaacctcgcggtcacaatatgcgcataagatgcttgcagccagcgaggccgcgctgcacatttgcaaaattctcacaccgctcaatgacctgacagtatggctggtacatgagattctcctattgtcggatatagtacatggcgactccagttcgttaagtcttccaatatatcagtcaccttgccttttctaacacctttcaggtcccgcctgttggaaacgactaggcgagctttcaactgacatttttgcacttggtcttcaccgtgactccaagacatcgagcggtgtacccgagtttctcttggaggcacgtagacgccaattcgctgcagcgtatcagctcgacaaaagcatcgccacattcttaggtcgaccgccaagattaccatggcgatacgccgattgtcgcatgccactcgatatcagcgatgaggcactcgctaccgataaaacaatcctacattacactcgcgactgcattgatgagaatggctggaatatccacggagtagtccagcggtcatcatggattcgagtgcgatttatcatcagtacatttcgggatgagattctcgaggtctctttgcagaacgtgacacccgagatggaaattatgctcaagtaaatcatccctttctccgtactgttgttcagcagctgaaactatacaggaacatctctcagcgatgtcatctagcatgggattcgctccccggttggctacgctacagcccgcaatgttgggatcagaatttacacgtagcagtgtgcctcatgatgattatttcatatctggcatacctatacaacgacttcctcattcagagactcattgccgggaagaataatccgcgcggaaacacagcactgctctccgtgagcgctgacatattatcaacggtcctgtcattaggcattcaacgcgagcaaatgattgatctccggccagattttgcgtggacagtaagtactaactaaattgaagctacttctacccatgatactaagtgaatggcaggttctactctacggcttccccagcgccagtctactcatcaaagctttgcagcatcaaaaacgcacaggcgagccattcctctacgagggatctagatcggcacttatccgcaatttgagtgtcttcatttcgcatcttgaatctatagttcggccggataatgccaactatgctctctttcagcgagccagtcagctattctcgaggattatcgatgagattctagagccgcagtccattcttccggactcgaatcttgatagttctgcttttgactttgatccgatgattgaggttgatggcctggattttttcaataacatggattttggtgttgcctttaatcagtggttgttttaggggcgatccgtgtatatagtcgtgacggaagtgctttgtgaatagacaaatcagagtatagatctgcctctgtgaatttacctcaaggggtaatcatcaacatcgtcagatcttctcggtctcactcactaccaccgtattgggctagactgtatgttctctacgctatgggatggagtagaatccccgcggaacatgaactctcaactatatgaatgattagcaagagaccgagccagagaaaagacagacataggctcaaaggtgattccacctgtgtaatgacgtctgtctaagcaaaagtactactgagtcaccgacttacctcgggaattcgacgcagcccgaggaactgtagctggggtctaagttgtcgtaggtaatggtgaccatgacgatagccagggtgagcgatatcctctgcgtgtctcaactccgcgtcgattgttacgttgacattattgctaaaccccgaggtctccatgaactgggcagagaaccagttccatgacaggacgaggaagatgcgagggaatctgaatacacgaaagattaataggtgccgaaaaaaaggaaaagaagacaatctacaaagaggttgaaaggaaaaagaaattgtggtttttaacaacaatcgacttccttgatttgaagccagccgcttttggcatatctggcaaatgaaggccaggagaatgggctgcaggggcagccatgcgcgcaaataggtatctaatttcctctcgccccattgacccgcgaaaaaagaagagatttcgttactctccaaagcatgaaacgtgaaattattcgccagaaaattgagattgaaggaaggggtcaatgtatgttgtatgacatcgacaccgacaccgacaccgacacccgtttcgtacacttagttgccttgggcgaagttggcctgagctcgggtattcttgatggtcttcttgatcatctcctccacttcatcccagtcgctagtatcaatgcggtcgatggtacactggaagtgctcttggatcttgcgaagcatctcccactcgttgcggttggaaacaaatgagattgccacgccaatgcgaccaaagcgaccagtacgaccgatacggtgcagataggtctggtagtcgggtgtgttggtgcgctgaccgccagagtattcctcggggatatcctgaatgcgagaatggttagtttggacgtgaaagcgaactaacaatgaactcacgtagttgacgaccaaggaaactgtagatacatcgattccacgagcgagaacattggttgtgatgagaaccttagcttcaccgctgcggaaggaatcaatcaccgcgtcacgctgggatccctcgacaccaccagtcagcgaggcgacagtgtggccctcagcaaccatacgcttctcgatctcaacggcagaggcacgggtctagagagcggtcagcaaaattccaatcttaatctgagataatacttacccgaacgaaaatgattgaggatccgacagtgagcagtccgtaaagctgaacgagattctgatacttttcctcgtcagtgctgcaatccatgtagagttgtttaatgccctcaacagtcaactcctcgtgttggagggtaatctcgttagcggcaggagcaaacttgcccgcatagcggtagacatgagcggggaaggtcgccgagaacaggacgatttgaacatttcggggaagcatcctattcaggtgaactattagcccggtactttgagtggtggaattagtacttacgccttggcccgaatgcactggtctcccaggccttgctggtcaagcatgttatctgcctcatccaggacaagcaccttcaaaccggtagggttcatgacacgcttcttgatcatatcctgaacagtaccaggtgtgccaaccacaaccgaacaatccatcttcgtcgggcgagcattagaatcggcaggaacagcagttccgataatgagcccttcaaggaattgacccataatctggatcactccgacaatctggcgggccaattcacgagtaggagcgagaatcagagcttggggtgttatctgcgactgctccgttgagaggtcaagacgactaagaatgttgaggacaaaggctgcggttttaccggtaccagactgcgactgaccaaccaaattcttcggaggattgctcatcagaaggggaagagcacgctcctggaccttggacggcttgcggaagttcatggtagagagacctttcagaatgcgcgcatccctggagtgtcaatcaggttagctgtgagactctcatttggacgcgtatcagtgggtagcacttgcaggcctagatcttcaaagcttttgaccgagaacagggggttgttggggtccgcttgcaagtcactcaatttcaccgcgacggtgtagtcaggctcctcgagatctgccgagccctgcgcggggccagaggcgccatcctccttagaaatggtggagacattggcgggatctgtgaaagtaaagaggatattagctatcagccggggtagcgcgttttccggtcgtgtggactggaggaacagcgacggtggcgtggtctcgtctcgtaccggtgggaatcgactcgtcaggcttggtgacacggtcagccaaggagcctgcagcaggggcagtctctggattctcagacattgtgcaaaagtttcgtgggtatctcgagaaagagttggagaaggaaagatggaggggtggtcgtggggtaaagaaaagttcgaaatgaaataagatggctgagcccgcgattggggttaatatggtcacagctgatgatgcgtttgggactcagaaggggataaaatcaaaagcccaagcacgtcgccagaaaacaagagctctctctgaatggaagcaaaaacagatgacgccgaagaaagcaactagtccgaatttagtcaaagtgaaatatatgtactggtattgtaaactattgtaatagatgggcaggacacatactaactaccagcaacgtgtatgtttggtattgtcacagggaccggtcttctccccgccttggccattgaggtcattcttcctatctgaatggcctcaatagccccattgaacacagcctaattggagacattaactacttggttgatactaagacaggtggttcattcacgagcttcgctggtaaccggaaaccccgtctcattgttcggtctcccattcccgcgctatcccatgcgcgtctgccttggaatctcaatcaagccatggcggccgcagatgtagctccgcatttcggagcagagttaaaggtattgatactggatggtgattttgcagatgcataactaaccgattcaatttatctaggattccttcaaaccagttaacagttgggtatggtccctacatcgtttccccgcaaccgacccagatcatgcgcttacagtggagctaatgcaaacatgttgcacaggtatcgaatggtatatcatgggtggacgagatacaccaattctaccgcgagcgcagcgccattgagaaggaatacgcatccaagttaacggccctgtgcaagaagtactatgaccgcaagtcgaagaagatcagtcccttgagtgtaggagatacacccaccttgacccccggctccctcgaaagcgcatcgctcactacatggactacacaattgaacgccgtggaagctcacgccgccgaacgagacaagtttgcccaagaattggtagtgcaggtggcggatcctctaaaacaagctgccacccagtatgaagagattcgcaaatgccatgttgaatatcatggcaagttagaaaaggaacgggaggcagcatacggcgatctcaaaaaagcgaagggcaaatacgatggcgcatgtcaggaggttgaatctcgcagaaagaaaatggagaccgcttttgatcatggcaagggcaaagcacaagcagcatatcaacaacaaatactggagatgaacaactataaggcatggctcaatctactggaggcgcatgtcctgatgctaacttgcggcagaacctctatctcatcggcatcaatgtgaccaataagctcaaggagaagttttaccatgaatatgtccctgaagtgatcgatgtaagatgaatccgccactcccttctcctatctaggatcgacaatggtactcatacttccggtcagggtttacaaaatctcaatgaaacacgagtcgcaaaaatgaacttgatgtggtcgctcgccgcccagcttgaaaagtcatctcttacaaatagcacgcagcacatggctaatcttcttgtcgaaattcctcgcaacaatcctcgtctggactccttgatgttcctccagcacaatgtgactcagtcacaagaacctccaaatctagaatttgagccgagtccagtatggcacgacgatgctgcaatcatcgccgatgagccagccaaggtcttcctgcgcaacgttttgagtaaaagcaaaactcaaatccgcgaactacgagttgagtcagaccggaagaagcgcgaagtcgaaggaagcaagaaaatacgggaaaatattcaacaaggcaaagataatcgaaacgagttagatgtcgtgcggtccattttcttcattcaagaatccttgcacgaggttgattgcaaatgggtcacagccgaggtagaaacggcgactatcattgcagtggctggagatttatcattgggagcccagaatcacaatttccgctctcagacattcaagatcccaaccaattgcgatctttgtggcgagcgaatctggggcctgtccgcgaagggctttgactgcagagattgtggctacacctgccatagtaaatgtcaaatgaaggtgcccgcggagtgcccgggcgagcaaagcaaggaagacaagaagaaactcaaggccttgcggcaggaacaggctggtgccatacctgttgtggatgtcggcacccctacagcttccactaccaccccgtcactgacgcgacagaatacaatgaactctcttagctcaggatatgcggccagtacgactcggtcgatatcgaacattgctacccagtccacagcagaaagcccagaggatcccccggctcttgttgcagaggcaaagccaaagccaactgtcgcagcaaagaggaaccgggtgctagcaccacctccgacagcatacatgactgcacctccgccgagcgacttgggctcgaagcccaaagagccacggggtaagatgctgtacgcttatcaagccggcggctcagatgaggtcagcgtggaagatggggacgaagtggtgattctccaaccagatggtacgtcttttcctaccgtttacacctatatttactaacaatttcacagatggttctggatggctgcgtgtgcgctcaggagccaatgaaggactcgttccggccgcatatgtcgaagccgccccagcaccatcccctgtgccatccgctagtcccagcatgcctgagcgacctgggtcaacgtactccaattcttcttcatccctggcgggaagcgctgcacccaagcgtgtaggaccagccgtcgcgcccagacgtggagccaagaaattgcaatatgtcgaggcattgtacgagtacgaagctcgcagcgacatggagtggaatatgttagagggtgaccgctttgttcttatcaaccgggatagtggtgatggatgggcggacgttgaacggggcggtgttacgaagagcgtgccggcgaactacatccaggaggtgtaggctggacgtctagattctgcccattggtcttcatacatgatcagaacagttgatgctgtctgagcttgtctgtttgtacggcctcataaggtccagccttggtttccgttggtctttttctttcctgtacagtcggcgtcatcagtgccgtttcgtcattgttctacataaggagcattgggggcattcgtgttggcatccattcgcgagtctcggatagagcataggacacgttgtttccattgaatcccatgaaagtcgggactgttctagtagtctgtaagaatgtagaccattactgaagatatacccgtatacccatcttagataacatcaaaccggatcacacggatagcagttctaccaacttttccagtctccgtagtgatagaagtgagttcacggaagatgtatctttaatgtgacatatttctatttccacaattatcttgactgccagacatctagcgctttagcctagtggtcacaaactaatactccgcatttgaattggacttggtccattgccaagtgcggacgacaatagccgcgcaatggatccatagttacgaatctgattagctcaggctgtaaattcgacaatcaactcaagcccgaaatactttccaagtgctatgtacatgtattcttatctccgggggaaattaaggtagttttgactcgatggtgtgacatgcttacgcctacccggtggattcggcgtgtcagcagcttacatcaccttcgctctagctggattgaggactgatcagtctccaggctttggagctagcatagttcattgtagggtacaaggtgacagaggtacttccaagaaacatcctaggcaatgcctcttggcaagtggaggtatgacataaggcaagtcttagaagtcaactccgtaaatccgaacttcctaatccttccaatatcaccacctcgtgaagcaagtttccgatgctgttaatccgtgatgactcggagatatgaagatacagaggcttaactccccgtgccaaggccgctcagccccggcatacgttatcctccaataagcgccaagagggcctcctcatggcccgtcaaacgtatgtaaatctaagctagaccaaaactcaaaataaccttggaaagcgacatataaccaactggcaccccggaaacccgtttcctcggacgtgggtacttagccatcgcaagctggacttcaagaatcaaaaatcaaatccctccacgcgccccctgtttgaccgcagaacataatgctctttcaaccgttatttaccacgatctgcgtactccttctcggcttgctagcaacaagcgcgactataggcattcggccgcaaatttccgggctggacaacaccctcggagctacgattcagacgattaagaatactatacaacagctgccgatccacgatgcagcgtcagtaaccgttcttccccggagatccgaagacgaagatcatgacgcaatacccgggctccacgaaacaacaatagactggagagaggatgggtctgagtctctgagactggaagcagagcgtgaggctggatttctgccgagttctcatagtgagaggtaaaagttgtatccagttgatcagctagtcagtagctaacatggtttgatagttatgactcgttaccgcagttttggcctttgtttaaaatttgtatcgtttcagcaatcgtaatttgtattcttaaaatagcccgggacttgaggtagcaataaaagcaaatcatgacatttatgtttctgtacagcagagttggctttgattcatatggcacatactagtctggccatgctgcgttacatgatgggtatctcatgagttcttcctggaccaaaaaagagatgcgaaaaggggtatgattaagataggtgcatagaattggtttcctatctattgtttcgctctcggatccttctagcgcgaagacccgactatttactttgatagcatagttgaaggaactgtggcgcagggatcgtgcaatcttaaacatctgcaacgaaccattatttgcgacaacaacgtcattgggcaatgagttcgatctagaactttattattttattattctgatctcgtggcaatcacccgaggatgatcgacgatccttccttgccccttgcatcacgaaccgtattgcagatcgagtatcttctccttgccatagaacagtcaaggaacaccaacccctgctctatgagcttgtttcaataatctatgacttcaatggcctttgtcctagcatatttctttcagttccttcgaacaaggatatagttagccgtatttactctcatcctgacggagtgcaatattctgtctgccgcccctagcgcaagataatcaggaacaaaagcaagtatggaacaatagatagccaaagcgcacagcgcaacgttacaccccaactctaaagactatgtaacataagagccacccaaaaagcaggctttaggtacgatatttcaaatactgtggggaggatggatgggtcgtctatatgatcgtcacgggtcggcccttggtcttgaaacgtccggtcctgagtttccattcctggcaataaagcataggttgtgtcacccctgaaactttgtatccggctctgcaggaagcatctcgtgtctgagcttaagctattgaattgcaatatctgatacgtacgattatatcacatcaccattgacctaggcctgcaaatataatcaatgatcatcatcctccgatcccaggctccagggctgtgattatagtgaggctaaaactccatatgtgtgtggagctcgccgatcatttgctaaggtgataattaatgttgaagggatcggcgcatactaggacctgatgcaagtgatcggagtgaggcgtggttacaccctcgatctgttcctgtccctggggctagactacaggggtcacgagtgctactgtgggattgggattgaaccatgaggctatcattctagaaaaagtaaatacatactatgctagtcatgtcgtcattgcgtaagtgccttgcttcccaggcatgtggcttttcttggtaactgcctgaatgggcctgatagtggagaatgggggtctggatttaaaacgtgggttttcaaccgaacgaccttgaccgatatttaggataatacggcgatctccgtacaacgtctgatttttaaaagctaaagtggacatattcggtaaaaagcggactgtgattggtccttgataatagtatgttgtaggcaaaatctgcctttatatacattgacataaaacatgttcgaaaatgaagtaacaagaatagaaaatatgtagccttcaagttaggcttgtggccaatgtgtgccaaagaactccccgctatgatgtcgcttgccaaaaaccgagagggaaagatgcgcctctgagaatgaaatcaagatcaaacaaaagaaaagaaagaaagaaatggatgcgaagtcgtgctcgctaaagccttggtgctgaatgtggctcaaaagagtagcctcgtataagagagaataagatgtcgcgaagtgaatcgttggtcgtgtgtgttcttcagtgaatcaccgagagagtaaaagaaaagatgcagttcatgcagttcgtgccgtcgccctcgaccctcgacgatattttaaatcatctcgactgaggagtcggcgtattctagagacaaatcgacagggtcttccatctggggaatgttagaactgaatgcgaccgaagaagaaaggacaggagtaagcttaccatggcgacgcatggatatggaggaatcatccacaggctgtgtagtgtaggctgcagcccaataccccgtttctcggtaaccggtgaaggtgcagttgctaggattgtactgtggctgcagggcggcaacatgcgggtagagcgttgctaacggtgagagaagctcatctgatggtggtggtgaccgtctgctatcgatgcttccacgagactggaatgtatatgttagactggttggcagaagtaagcatggatcgtacttacgtagagctcatagttggttttataactcataatgttggtagtgatggtgtgattgtctcaatgcaagatgacgagacctagttcaaatctgaatgctgagatgcaggtctcaccagaagcgaagccggctgcatttaaatgtatcggaaatgctcagccgcagcaaaatttggaagcgggggaaattaagacgtcaagatccgcatctaatcgcctagtttgttttcatagataggatttggttacacccgggaactcgggattagatggtctccaccgaaacgtaaatgaaaccttttcattggctgccacgaggaagtctaagcgttagggccgatcggagtccccgatgtgggaaagtcgggatacgaggattgcagtttgcaggatccctgcagaccatgaatcgtggcatcctcgttcgacgttgctgcccccttgcatattcctcttctcgcttccacgttttggttttacccttattctcatgaacatgtggtcctgcgggggggagcaaatatcgtcgaattccgaaatgtaagatgtgatacgagatcccatccccgaaccgatccggactctacctgtttcctatattgtataatgtcaagatgatttcattctaagcagaagtgggccacatgtcagccatgtcgcacaggtcaccaactaagacaatctctaagcgagtatattaaaagactaatgagatcactgatcttccgctagttgtaaggtttccaaatcattttcaaggtgatccagggcgagatagtgcgacagactagccccgaatatattgcactattgataacgctacgccagaaccgctctagatcggccttgggaactgcctattcgggcctagcggacaattccattgtcggttcgggacacagccacacaccccttgctatttgtggacaagcggacgagccacatcgtcggtctcaccgtggctcaaaccgtggctcaccgtggctcaccgtggctagtgaccacatctgtggctcaagcttggtttttgttcgatagcttcccagatccactccaccctgcttcacctcggaaacccgaactagtccgcccttgatcttcacaacttatcgattttgggcacccttaatggctcggtcttccccgtccgctgggtcgcggagctataaggcattcgtctcccccagaatcatgaactattccacaagtctaaatccacctttcgtttgaagtcttcctctttgcgcttcctatatcaacacatgtcgactgtcgaacatgtcactgagaatgcagggttctggaagagagtgctgggaaaactctcatcatatcgacatgcgcgacccttactctcgcgaacaacccgctcaaagtgagttcctttttctcttcacctcccctaccccggtcgtgcccattgcgccggttacaccatgacccatattctgagacctttcgcctttgttccaggatccgtcgaacgagacgctgaacgcatccccgataggcgcgaacgctcccacgacgagggaatgaacccagagacgcagtccatgttgagcgatgccgagtttggtcgcgtggaccatacgggctggttcccccactataagaattgtgttcaacatttcgtggactacagccagcatacgccccaagtgcagtccattgccgcgttcatcaatattcgactaccctgtcagcgacctgagtccagcgcaccggtggaaaccacgtcattgccctttatttcgctgcgaccctacatccgacgattgattgtcaccgcgcaagactcaccgagtgttatgcaaggcttcttcggtggtgactgggaggctggtgtgggctgtatctacaagcaagaacgggtgaactatatgtttacggccaaaagcagtgggtgggcagctaccaagaccgcctacgacatttctccagatgaagaaactcccttcttgaggcccctgcgtgacccctcggaggatgaaattcgagtggccgaggcgcggtggagtgaatggctggcaatggaagattggatggttggagcgcgcagtccctggtaggatagcgcgatcatgaggcacgaatttcctattcttctcttttcgtttttttttttcttatgtccctcgtgccccaaaaaaattacagagtgtgatgtggcccaattcactgagtataatgacaaacgtacttttttttctccattttccatgccatactccgtagggatagttcttccccatagcaatgcagatcatcataagcatgtcaaaaataaagtaaataaagtgcagacattagagttgacgagatggtcctgcgtcataatcgatagtgcaccgccacaggcacagaccagagtgacaaatacttaaactcggagatcccaaatattaatttaataaaattccactccggacgtccgtgattttacaaaagattattctgatatctaactaaccagactcagttagggctatccacctctgactcaccgtcatgtcaggtgtcaacctgtcactttgcgatcaaatcgaggatagtctcttctgcaagttcgcttcaactcgtgtagagatatcgaatccaggttcccgggtacctggtacctcgcaatggcatcgacatgcatctacgagcatgatgcagccacaataatcccagccctcatatctgaactgccgtattccaccacgctgctccggcgaatccagcatggaattgggtatccgcacgagactgcccacatcctggcgactttcccacccggtttagcccctgagcctggacagccgtggctggctgcgcgggtggatctctttgccggccgcacaacacaaatgttcatctactccagtctcgaagcggagcacacgtcaattccgccgatcgccactgtcggcgatagtatcaaagccacgaaaccggagatattaaatgtggactctggatccaataataaccgaaccaaaaatggtaatgatgttggcgcaaaccctgacaccaacaccaagtccattgtttccaccttttccgccaacccgcccgtcctagccttggcccgcgcccagctattggatttgctgtcatatgtcaagaccaaattgctgccatcctatctgtcatatttgcaagccacatctgcggaagctgaatctcttcccgtgtcgacatccctggtgaccccaaacaccactcccagtaccaatagtactagtagtgttcccctgattgccgcgccagacccacacgccttcctcatcggtgcccttcatacaggtctattctgtctcctgcagcaatcaggctcttacacccaatctgacccgataccttgtatccgggtccatcgcttcgacgatccgccttattacaagtacttcttccggagatcagagttcagccccgatgcagatctaccgtgcgccgatctgtccctcccacccgggtataggttccatgaccgacaggggagggagggtgttctgagtaagcatctagatcttgtgcagagtcggacgcatatccccaggccgaggtcgcagctatctacaatgcctggtatggcggtctattttgatggctctagtgatgatgatgaaatgcctattgcgtggggattcttgggtgtagatggagcgctggcgacgttgcatgttgaacccgagcatcggggccgcggccttgcggctgcattgtctaaggctgttatgcgtcatgggatggcagtagatgggctttttggggctgggagtgttaactcggaggatagtcacactcgagaatgtattggggcttgggcgcatactgatgtagctgggtataatcatgcgagtcggagggttatggagaagattgggggtcaggttctgacgactgtcacttggactgttattgagttgcttgattagcgttttcatcttgggttgtctatatgagtggaagatatataatgaacgatggaaatgagtttatatatctttacacttatctatgcagcgatagctgtcggattttacaataggtgacaatttcaggagtaattctagttctctaatatttacatgtaaatggattctagatgaagccctaatatcatagaaactgcatagttatgttgtaaacactgaacgttgactcacctatctccatcgtccccagatattcccaattaggcttagtggatgatcgggtgattcgacgagatacacgggggaacttcacttcgaatttctctattttcttcatttccaagccattgaccaatctccgttccttcaaaatgagtaatcccaaaggcgtcgctgagaacatgctctggggaggccgcttcacccgtgagtaccacaacccctccatcccaccaaaaaagcccactgactcatacaaaaaacagagggcctcgatcccctcatggtgcagtacaacacgtccctcccctacgaccgcgtgttctggaagcaagacatcgccggctcaattgccttcgcccgcgccaacaccaagtccggcatcctcacaccgcaagagttcgccgagatcgagcgtggtttcaagcaagtcgccgaggaatggcaaaccaacacattcgtagccaaggagaacgacgaggacatccacactgccaacgagcgccgtctgggcgagatcatcggcaaggatatcggcggtaagctgcacaccggtcggtcgcgtaacgagcagatcgccacggacatgcgcctgtggctccgcgacgagctccgcgtgatcgaggcccacctgatcaatctgatcaaggtctccattgctcgcgccgagaacgatatcgcctatctcatgcccggctacacccacctgcagaaggcccagccggtccgctggtcccactggatcctgtcgcatgccactgcctttgctagcgagttggagcgtctccgcgaggtgatccgtcgcgtcaataagagccccctcggtaccggtgccctggctggtaactgcttcaacattgatcgtgaggccatggccaaggagcttggcttcgatggcttgctgtacaactccatgaacgcggttgcggaccgtgatttcgccatggagactatgcagtggggtagctcgttcatgctcaagatctcccgctgggccgaggatctgatcatctacagcagtctggagttcggctttgtccgtctgtcggatgcttactcgactggatcgtcgctcatgccccagaagaagaacgcaggtaagtttgactttagtcatgtactatagtagaatactaacatgttccccattagacagcctggagctgctccgcggtaagtctggccgtaccttcggccagatggccggcctgatgtgcacaatcaagggcctgcccactacctacaacaaggatctgcaggagagcgtcgagcccatgctcgaccacgtcaagactgtcagcgacagcatccagatcgcaaccggtgtgctctccacgctcaccgtcatcccggagaagatgatcgccgccctggccccggagatgctggctaccgaaattgccgactaccttgtccgcaagggcgtgcctttccgcgagggacaccacatttccggccgtgtcgttgccctggctgagaacaccaatgtccccatggacacactctctctggcgcagctccaggaagtcgacgcccgcttcgacgcggatgtccagacttgccttgactacgagcgtgccgttgagctgaaggatgccattggtggaactagcaagcgcgcggttctcgagcagaccgccgtgctgaagaatttactgtaaactcttttggtacgatatatgacagaaaataaatgttaggcttttggttagactaaaatgaatatatgaattgacttgtttagatgtctaaaataaaagagtgaacttatatgctgctattaaaggagggatatcatacaacataccagaccattaagccggaactccaaccctaacataaccccgaaaatcaagatcaacccctcaaacccctcctctggggctcatacccattcttccagacggagacttaatatcatgtccaggagctccctgtgccgcctcataagcaggcgggacatcatgaccctcggcagccacaatatcatcttccaaactgcgctgggcaggcctagacgcactgcttccacctccctgggggttagaagtaatgccaccagtttcaattccaagcccagtccctccccgatccccagcatactgcataaaactcataacatgatccgtcccgccgcgctcagccgttctccccctttcgcccagcgcctgggacccagactctccaatttcgataccattagagtatcggtccagattcgcgcctaggacaaccccctcggcagtgacgacccgtccagcctggttccgccccggactaccgccggcgctgtggctgtggctatggccgctgccggtgtcggctgctcgtgctgggcttgcgcgtgaactgggtatagaggccaaggcgggcgattcccaggcccgtggactagtccatgagttgataatgggctgctgtagctggcgttgttggaggggtacgttgatcagctcgctctgggcgtgcgaggctagttcggcgcgttgccggtggaagcctgtgtctggtagctcgggggtgaatccctggcggggagggattgaagcgaagagctcgtttgagtgtggttgggttggggggatgggtgttttgcggggagagtgggagatgaggcttgtggcggaggactcaagtgctaggtctggggtgaggattatgcttcgtgtgttatctgtgaatggggaggcggcgctcgatgagtctatcgatgcgatggcttgtatcagtgatatgttacgctgcctcaatgggtaggccagttagtctgggatgtgtttctgcttactatgtgcttcgctgtctgatggcgatagcgggcctttcatttcggatgcagttcctcgatctttgtaccatgagacaagagttgtgccttcgcgtttcccatgttttctcttgcggcgacagcaacagaaaagcagaatggcacatatgaccaagaccgcaactcctccaacaacaccgccgatgattgcgcctaggtttgaggatgtggcacctggggtattggatggagatgcgctagatgtaacacctgtagattctgtagtcgtggatgtgtcagaatttttagaaagtggcgatgaagtcgccagtgttactgaggatgtgggtgtctccgaacctgttgatgtatttgaagtaatataagctgtcgacgagacggtagcttgtttcgacagagtggatgtaggggaagtagtgatggttttcgtcgtcacgctggacaccccagctgaggtcgatgagagtgtgtcatcgtcgtcgtccggacaaatcccagtcgtacatggatcagttgcgcagcatccacggaagctgcctgccgtgcagacataccacagcttggacccagtgcaagtagtatcgtctcgagggacaagagaccacagggactcgggagactccatttcgaataccttgaagatcaagtctcattcgccgaagaagacaactcgatcgaatcgcaagacacagcaattacgctggatagcacaagcttgaacgactggaagcgagagatctcgtttcaccgatatttgagaatctgccagaaatgataggtcaaatgggttgtgcctcgacaaatattctttgcaggcggcattcattaactttcgaatggagaccacgaccctgttttctgaaagaagtcgagaaaggattcctttgttggtgcggggtggcactgccatgccaattatagatccttgtatgtttgtcaccaatggggtccaaggctcctgcgcagcagagttgggttttctttagtgcagtagatgcgtctctttgacgcagattggataatacggtgataaatgatcgcagaatctaagaagtcagcaagaaatcagtcgtaggtcaataaacaaggttcgaaagactccaaggggtgttcggtttctttgttgacagaccagggtcgaccccggggattttgagccaaatcaaacaaaaaaccggagttttgatatggacaaggagaaaactacaataagaacctaagacggggcacagaaaagcattaagaagtaataaatcaaatcatatgagacaaacagagggaaaaagcactcagcacaccaactcttcgcctgttaagataaaggaaaacaatatggctatacaggatggtaagtaacacagtcaacaaaaaaatggtctttttcatagatatttccccttgaaacgggggccttgtgacgccacaagccatagttccgtctcgaaactacgaggctgggagggcgtcgatagggtccatctgaaacaactccgtggtatcctcctattctctgcgggtcgtatccaaaatagcgagcttagtagacacgcttgaaaggaggaacagacttgcactccgactcatccaaggtgtgggactgaacgggacggtagccaagcttgatctcgccgtggggaaccttctgccaggagagagtgtgcttcatccagtgctcgtcatcacgctcggggtaatcctcacgggcgtgagcaccacgagactccttacgagctgcagcggaagcagcggtttgggtactgtgagatccaatgttagcaagcgattcctagatcagttattcggagttacgtacgcgcaagtgagcaggttgcggagctcaagagtctccaccaagtcggaattccagatcatgctgcggtccttagtgccgacctgttcgtacagctgatcaaccttgttgatcttctcaacaccctcgtccaagctcgactgggtacggaagacgctgacatcggtctgcatgaccttctgcatagcgttgcggacttcaaaagtcgacttggggccatcggcattacgggcgtggtcgaggtccttgacagactgagcaccagcatcggctgcaaggggcttgtggggctggccagggctggaaatgtcacgaacacggtgagacacagcgcggccgaagacaaccaaatcaagcagggagttggcacccaggcggttagcaccgtggacagacacacaggcggcctcaccgcaagcgtacagaccgggaacaggcttctcctggccgttctcatcgacattgagaacctcaccagtgtggttggtggggataccacccatgttgtagtggacggtgggcaggacagggatgggctgcttggtaacatcaacaccggcgaaaatcgaggcagtctcggagataccgggcagacgctcgtgcaggagctcagcgggcaagtggctgagctgaaggtagaggtggtccttctcgggaccaacaccacggccctcacggatctccagagtcatggatcgggagacaacgtcacgggaggcaagatccttggcggtaggagcgtaacgctccatgaaacgctcaccctcggagttgatcaggtaaccaccctcaccacgggagccctcggtaatcagacaaccagcaccgtagataccagtagggtggaactggacgaattccagatcctggttagggagaccagcacgagaaaccatagccataccgtcaccagtgcaagtgtgggcagaggtacaagagaagaaggctcgtccgtaaccaccggtggcaaggacagtgtggtgggccttgaagcggtgcagagtaccatcctcctggttgtaggcaatgacaccacggcaaacaccatcttccatcagcaggtcgagggcgaagaattcaatgaagtagttggtgtggtggcggagagactgtccgtagagggtgtgcagaagggcgtgaccagtacgatcagcagcggcggcgcaacggtaagcctgaccacccttgccgtaatccttagattgaccaccgaaagcacgctggtaaataagtccatcctcagtacgcgagaatgggcaaccgtaaccttcaagctcgcggacactggcgggagcctcgcgggtcatgtagtgaatggcatcttggtcaccaagccaatcagaacccttcacggtatcgtacatgtgccatctccagtcatccgggtgcatgctaaaattcagttagactcaattcggtaccttccggtgcttgcggtgaaaacctactttccgagggcagcgttgataccaccctgggcagcgacagtgtgacttctcgtagggaacagcttggaaacacaagcagtcttgaatccagcttcagccagaccgaaagcagcgcgcaaaccggcacctccggcaccgacaacgagggcatcgtactcgtgatcctgcgcatgttagactcaatcaaccgcctgtgagtggtagctcttacaatgatagggtacttgtcactcaggtagccactggactccttagcgcgcaaaggctggttggaccatatccgggctggcgcagtttagttagtgacggtgcgttcatgggttgagtagtctaatgcgtacctgcgggctttgaagatgagaagagacgtctttggttcctcaagatgcgggaaacctagagagatcttatgagtatgtcatggccgttgcgaatgggctgaaaatcgttgcatggctactcaccttggaagcaggagctaaactccgcatactcatggagctcataatggcggatcaaacgagaattgggtttccctaaatgaaccgagataatcgcaggacaccgagggtcggtgacaggcttaacaaagaggggagattgtggaatagcgaactccttccagggcgacactttcatctggactcgggttacggttgaacagtttcacgctgacataatcattctcccagttgccgacggggaggaccgggccaaattagccaatcagcagctgcgcaatgaaaatcaacctcgggcagccggttgcccgtgattggccaattggaaaggatccactatctaggtgtgatattccattttgccggccaacacagctgcccggaagtcaacggtagagcgtcatatcacgggatcttgaatctatatctggttatcttttctaactttagtcccacttttcctagtagaatgacgtgcaattgctggatatcgatcattgtggtatctagtagttagatcgagatagtcatgtgattcaatatgaccagttagaatcacatgacaagccgtgtgcattccgaccaaatcaggaaagtatacggactacgtactacattggtagtacacaggttgaaattatattgcattgaccaggaaaaaaactcccatgtaacaagacaatagtgatcgtacatcccatccataatgcaagtgagtcggaatttctagttgtactgcatatatgtagccgtcgagttgaacttgaggttgcccttaatcaccttctcaacggaggccaagaagtccttctcggtggccaccttacggcgagcccgaatagcaaacatacccgcctcagtcgcaacactgcggagttcggcacctgtagcgttggggcacaatcgcgagatcagctcccaacggatgtctcgctcgacggacatgctcttggcatggattcggagaatgttggcacgaccctcgacatccggtagtgagaattcgatcttacgatcgatacggccgggacgcatcaaggctgggtcaagtgtagacggacggttggtagcgaacatgactttaatgttaccccgagagtcgaatccatccagctgtgtgatcagttccagcatggttcgctgcacctcgttgtctccaccagcgccatcgtcaaaacgtgcaccaccaacggcatcaatttcgtcgaagaaaataatgcatgccttcttggtacgggccatctcgaaaagttcacggaccatccgagcaccctcaccaacgtacttctgcaccagttcactaccaatgacacggatgaaggtagcatccgttcggttggcgactgcacgggcacaaagggtctttccggttcctgggggtccgtagagcagagcacccttgggtgggtcgataccgagattcacgaagcgctctggcgatagcaagggcatttcgactacttctcgtagcttctcgatctgttctttgcatccaccaacatcgccgtaggtcacatcaggcttatcttcgacagtcatcattgtcacgctggggtcgatctttggcggcaagggcagcatgatctgatacttattacggtcgacgctgcgaagcctagtcagtacatagaaatgacatataatccgccatataacttacccaactctcatgccttcttcgatatctgtcggactaacgcgctctccgaggttgacaacgaacttggcaatttgcttgacgttgatcacgtatttgctcttgtccgagtccttctcatcctggataatctttgtgcacctcgcgacctgtagcggctgttcctccgccatgcgttgtcgatcggcagcaacatcccaaaggtgtggaggcgccaaaccggtgtcagattcctggtaagacattagctcgagttgttcaaggggccgaaagagctggataagttatcaccttaacgccgatcttctcattcacgctgttttgcttttccttgatatccttctcgagcttcttcagcgcattcgcgtaaggtgcggcgccgtaggtcttgagtactgcgatgtcactgtaataagacgtgtcaatcattgccatcgcgctttgtgtagattgaatcgacacagaccgggaactcactcgtctgtaaggggcgtaatctttttctctggttcctcatcgtctgcgtagttcttcttgaacttctcccagttctcacctgtggcgctaggcatgatgaaaggtgttgacagcccaaggccgagttaagggagggtctgaggaaacaatgaaatcgaagatgtatatgcaggaggaacaaattcgacgtgatctaaagcggtgtcaagttgaaaataagatagataggttgggtattgggagagcaaaggacggtgatgtagcagagctgcggtggtcgagctagcctcactaatcaggtgccaagcttcatcaccgccccagaacctcgcagaatttcctgtgtgtcctccaccacaacaactcaactatctcctttcactcatttttaaaggttaattttgaatatcgatcttcaaaatggcctccgtactagcacagggagccggcggcaacaactccttcaaggtgcgaggcctcaaaacgatgtgtgtgggccactgatttctgattgcatgcaggacaaggagaagccgatggccgtgcgggcctctaacattctcgctgctcggggtatgtatattctcatgatgttaaaggcgcccatgctaacggtataatagctgtctccgatgccattcgaacagtacgcttgctcaaacgatctgcggatacatagatgaggggctaacaggaatatagtctttgggacccaggggtatggataagatggtgagtttatctcggatttttcttctatcagtatgctaatgtctctctagatccaaacggccaaaggacggaccatcatcgtatgcagcccaattcaatccgaacatatcagaagccacaactgaccccccgcagacaaacgatggaaacactatgttgaaggatatgagcgtgatgcaccccgctgcccgcatgcttgtcgacctgagtgcggcgcaggatgtcgaagctggtgatggaacaacatcagtggttgtcattgctggcagtctgctcggcgctgccgaaaagttgctaggcaagggccttcaccccactgttatcgcggaatctttccagagagccgccggtgctgccgttgagatcctccacaacatgtcccgtcctattaacctctccgatcgttctaccctccttcaagccgcttctacttcgctttcgtccaagatcgtgtcccagcactccggacttctgggcccgatggcagtcgactccgtcttgaaggtttgtgacccgaagaccgcagagaacgtggacttgcgggacatccgcatcgtgaagaaggttggcggcacaatcgaggatagcgagatggttgatggcgtggttttgaaccagcccgtgatcaagagcagtggtggccccacaagaatcgagaaggcgcggataggtctgatccaattccaactcagcccgcctaagccagacgtatgttaattcgctcctcaaactgttactggaacaagattgacaattagattctagatggagaaccaaatcgtggtgaacgactaccgccagatggacaagatcttgaaagaggagcgccaatacatgctcaatatggtcaagaagatccagaagactaagtgtaatgtccttctgattcagaagtccatcctccgtgacgccgtgaacgaactttccctgcacttcctttcccgtctcaagattctcgccatcaaggatatcgagcgcgatgaggtcgagttcctgtgcaagagtctcggctgcaagcccgtcgctaatgtcgactctttcactgaggacaagctcggcagtgccgacctcgtcgaggaagtgcagtcctccggtgctcgttacgtcaagatcaccggtatcaaggctcctctctcctcttacaaccagaccgtctcaattgtcgcgcgtggtgccaacagcctgattttggatgaagccgagcggtctttgcacgacgccctgtgtgtcattcgctgcctcgtcaagaagcgtgccatgatcgcaggtggtggtgctcccgagattgaagtggcccacctactcgccatgcgtgctcgtgagcttaccggcactgaggctatctgcttcaaggccttcgccgatgccatggaggtcatccccactactctggctgagaacgccggtcttaactccatcaaggttgtgactgaactgcgccaccgccacgcccagggccagcacaatgctggtgtcagcattcgcagcggtggtgtgaaggatgatatcacagaggagaatattctccaacccttgctggtcagcactagtgcgattgagctggccgcggagactgtgaagatgatcatgagaattgatgacattgctctgtcgcggtaaacgccctcggcggccgctagcgtgagctgtatgatggaaagcgatctaatcgtgacgagtaattaaaaaaaatatcccgttcctgcatagaatcactattggactatacactttctgtgcaatgtatatggtagaccgagatccctgcaatgctatcctcgcaagttttataataaaaagtgagactcagggcaagtatagatatactcgagggtgtcatattgacatgaaagatttaaaattggagaagtatggcctgaaatatatagagcaacactgcgctcaccaactgccatgagcagccaatgataccatggacattctgcagttacattagcgacaagtcttcgtgagaattgaactaagaactatcaatatctaacctaaaatgggcttgaataaggatattagatgctaaacaaatgaatagactctttgtccatgccaagaatggcctcggcctgtttcgcaagattcgccattcggaagccagccctcgaaagaatgacctctgcttttctatacattgtctcagtaattcggcgactataaatatatatacaatcacactcactgtcattgcaacagtgttgctggcgctcggctcgaattgctggcgataagagatagagtgacgatcgacgtcagctccgcctgctaactccgatcgacagccaccatgggaaagttcgaagatgaagggaactcagagtccgtaccattgactcgacaacggtcggaatccctcgcctcacaaatatccaccgactcgggcctctcgatttcctccgagtcatccatgaagaaccacaagggaggcaacacgctgccgatggaggaaggggaaggggacagataccgggatattgaagacggaggagaaactggcgcagatgagcctcttatatcaaaccggaagaaggcaggctcatccggtcgtctgcgccagatcgtctggttactggtgtttctgtgcgtcggtggctgggtgctctctttcgtgctgttcctcacgcagaagcgacccgataatgcggcgctctcgtctgcatcaaccgtggacgtccatgaaccaggcttggctactggtaataccagccacgggaaaccagtgacactgcaacaaatcttgagtggtacctggtctccgaagtctcatgcgatctcctggattgcaggcccgaacggcgaggatggtcttttggttgagcaggacgagaaaaaagacgcttttttgcaggtaaaagacatcagcggtaacaaagacggcgtcgatcatctcgagaccagagtgttgatgaagaaggggtatatttggtttgatggggaggccatcccaccggtcaagacgtggccaagtcctaacatgaaaaaggtcttggtcatgactgacactcagtccaattggaggcactcgtattttgggaaatattggatcttcgatgtggcaacgcagaaggccgaaccgctagatcccgggaacctgagtggacgtgtacagcttgcagcttggtcaccaacctctgatggggttgtctttgttcgtgagaacaacttatatttgcgtaagctggcctctttggaggtcatccctatcaccaaggatggcgacgagaacctcttctatggtgttccagactgggtgtacgaggaagaagtctttgcaggcaacaccggcacctggtggtctgatgatggcaagtttgtcgcattccttcgcacaaacgagtcagcagttcctgaatatcctattcaatacttcctttcacggccatcgggcaaacagccaccgcccggactcaaaaattaccccgaagtgaggcagatcaaatacccgaaacccggcagtccgaatccaattgtcaacctgcagttctacgatgtcgagaaaaatgaagttttctcgtttgacatgccagaggactttgtcgacgatgaaagaattatcatcgagattgtctgggcgtccgagggcaaggttttaatccgagagaccaaccgcgagagcgatgttgtgaagatctttgttatggacacaaaggcccgaactggcaagctggtgcggtcagatgatatcgcagctctggacggtggctgggttgagcctacacagtcgactcgggttattcctgctgaccccaaaaatggtcgaccacacgatggctatatcgacactgttatttatgaaggctatgatcacttggcttatttcacaccttttgataacccagagccggtgatattgaccaagggcaagtgggaagttgtcaacgcaccgtcagctgttgacctgaagaagggtctggtatacttcattgccacaaaggaggctccaactcagcgtcacctatattcggttaaattggatggctccgatcttcgacctctgacggatacatctgcacccggctttttcgatgtttcattctcccatggagccggctatggtttactcagctataaaggcccatcagtgccatggcaggccgtgatcaacacccaaggtgacgagattgacttgataaacctcatcgaggagaacgttgaactctctaagatggtcgaagagttcgcccttccaacggaggtgtacactaatgtaaccattgatggttacacgctccaggtcctagagcgccgccctccaaacttcaaccccgaaaagaaataccccgttcttttcttcctgtatggtggaccaggatcgcaaacggtagaccgcaagttcacgatagacttccagacctatgttgcctccagtctgggctatattgtcgtcactgtggatgggcgaggaacaggtttcattgggagagaagcccgttgcgttgtccgtggtaatatcggccattatgaagctatggatcagatctcgacggccaagatctgggctagcaagagctacgtggatgaaagccgcatggccgtttggggctggagctacggtggctacatgaccttgaaagtccttgaacaagacgcaggcgagacgttccaatacggcatggccgtggcacccgtcactgattggaggttctatggtacgctccttgaatcattactgttcagtttgtttcccaacatgcacatactaacatcctccttcgtcatagactctatctatacagaacgttatatgcacacccccgagcacaacccctcgggctatgcaaatgcctccatcagtgatgtcatggccctaggccacagtgtccgatttttgatcatgcacggtgttgccgacgacaatgtccatcttcaaaatacccttgttttgatcgacaagctggatttgaggaatatcgacaactacgacatgcaggtcttccctgattcggatcatagtatacaattccaccgggcgcatgcgcttgtttatgaacgtaagttgattcccaacgcgcttccattcaatcgcttcccaaggttgggaaatgagatgacatgactaattgtgaatcaaggtctctcgagctggctcatcaatgcgttcaatggtgaatggcatcggaccgcgagtccgaaaccacaagagtcgacgtgaacgcagacttttgcttttttggaattatgtacacccttgggtatatattctactaaacacatatagctttgaattaaggaacaattgatgcatattatgattctgtattctcattaagactaagaatttatgatagaaggactgtagtcgctgaggtatgccacaatttgtcaacacgtcaacaaaattgataccagacaaaacatattaacagagggcttttgaaacatttcctatggttccttccaggaaccaagacaccgaataatgcatgtatgaacagaaacgcgaaaaatatacaggaatgaaatgcagtatgtgcaagtagggtaaggaaggaagggtgtgtgtatacaactcaaatcaagacgagcgactaggagagcgcgcgccaggagaaagaccgccagcgcgaaggaagtcctctctgttggcgacactgacatccgaatttcgataaggaaggtagtcttcacgctgcaagccacgcagctgttcccgaccgacagttgagacggagcgtgcgtaggactgaggacgagagagggtcggacgggcattcagcacagacagccgatgactggaggtccatatgggtgatttactacccggggacagcacggtcgtccttggcgcaaagacaggcagacgagcgaaggactcggtatccgtggagacattgctcatgctcatagccgagatgtcagacatgggacggtggtagccgccgcgactggggatatgggacatggaactgtagacggtggagataccggactgggcggacgagcgccaggagttcaccgcgtcgcgcgggatggtgatgatctcttcgtcgacgccggtctcgatggcggctgccacgtcggcgggctcgatcgggtcgcctgctgcgcggctggccatcatcttggccgacttgccaatccacaacatctgctcgtgctcgcggaggtaccggtcgccactgaaagatttctggacaatcgtgcgggtcatcatgccgagtttgcgacggtgctcgctcttctcgtacatacggcgggtgatggctgtgacttcttcaggggtggggtgggaagtcaagactggggcggggcttgtgtcttcgctgtgtttgctccattcgccaagcatggcaagcatgccgatttgggcctttgccagggcgagcgcgtcgtttggtgcgacaacggcactgaagcgggagaagtcatctgggtcgctgaggactcgaagggaagcaccgacgtcagtgcagacgacgggagctccagtcagagcagcctctcccagggcgagaggaagaccttcagacagagatgaattcaagaaaagccaggtgttctccaggaccttcatggggtcggcagttccgcggagtgtgactctgccacgaagaccctttgatgcgatgatctcttgacactcagtagagtaagtcggagccttgtcaatagcgccatagatgtccaggtggtactcgtcgaacttccactggttgatgatgatatccgcagcgagaagggcagtcttgatgtccttggcataccaaacgtgggataacatggtcactgtcggacgctcggatttgatttccttgaccggagagaacttctgcatgtcagtgattccgttgacgacaggatcgatctttctgcggaaagtgtttcggtgctcaatcgtgccctggcaggtaccaatctcgacctcccaaccggggttgaagaagtcggcacagggaaggaggatgtctgcgtggtgaagggtcaagacggaggtaattcgcatcaatccaagtagcgcgtttcgaacaaatggcgagagcttgcacaaggcagatgacagacagagattggtttcacgccaactgatggcgtgatcccaaatctgcaaggtacagttgcgcttgatcttgcatacaacaccgtaagaggcgctgacactgtgatgtgaggcttggaaggttgaaggaatcttttcaggaaccgggatcgagaagatgaagagatagcggtaccagagctccagggcgacatcgagagatgtcaaggtaggaagctcagtgtcgaaccactcggatgacgggatggtgtttggcatttcctgggtcagccacaactcacgccagctctgtttcacaatttcagtgttccacacctgagtccaatgacgggactcctggaagtatgtgttcagattcacaagtgctcgagtcgcttggtggatatcagccttcgagagatgaactgcacgggcacccttaaccaaagctgtcagaatcggaatgaagttcatcttgatgtcgtactcgctcgcggaggtaacattgtccacctcagcatccagcttgttgtggaacaaaccgtgagttggagtgaggaagtccataccccaaagcgggatgagcttcagagactggatgttctgttcggtctgatgctttggaacaccgaaatcgttggcagactcgcaaatcatgtgccatttgatggttcgcagagagttaatcatatctcgtcgacaggcagagacaccaccaccttcattaggccaggtaccgttgtcggccgccatgacatggagcgtcttttcggtatcggtgccaaagttcttggagcgagtgttaacaacagcatctcctccagggccaaagttgagcaaatcggtgagcttaacggcgagtggggtccagctggaaatgttgtcgtccagatccgcactggccatgatcgcatcagcgcggagatccacgtatttctttgcagccgcgagatttccccagtcacggctgcgccagtaagggtgaagaaccttatctctgcgcaggatacggtcatccatccagcgaacgataattgcatcgaagtcaacacgatccttccacgccttccacatcaaggagcgagctcgagaagttgacataacaaagcgcttcttcgtgaggcccagtgtccgggtaaggaaagttgactggagactatcgcagtaaacaaaggggttatcatgcacaaaactggtatactttggcttggagagtacacccagataatcgtgctcaatcatcggcggagtctgcatcttctgcccattgatagtggtaaagatggtgggatggaacttgtgatcatacaaccaacgactttcataaacatcggcgccttggacaaagctggcctcggttaccttggagtgaggaatccagcgttcaaccttctcgggatggcgacgcggaggcgcacaccaagacacagtacagctgatgtgggacaagacaaattcggctcgcaacagttcatcaccgaaacgggggttcttgcgatagtggtacttgaagcggataagattgccatccttcatgtacgaaccagattcgataagacccttgcggttgtactggacgctttgcagatggttcgctcctgacacgcaacgtcgtcctagcggaatgcggtttgaggatttgctaagtttgaagctcttctttgtcggagatcggtagtcgtagtggtattcgttgatcactttgccgtccttgaactcctgcttgaccagaagcaacatctcacccgaaaaggtactgacgaacttcagggatttgacctccttgggctcagtgctatgctcgccagcgtaatggtagatcttgaaagtgccatcaatctcgtggtgcctgaatgctgtaaaggtgccgtcctgactctggacaatgatccggctctttttgatatggatcgtcatgcccttagtctcttcccacagccgcttgacatttttgcggccatggaagaggaagaaggacaagcccaagtcttgaacgagcttggaatagacccagaccatattcaataagaagacggttggcacacggacaacgctcggaaggtccttggtgacatgattgaactctctctggaattccggatctgcgactgaagctaccacacagaacttgataattgttcccagcttgtggtaaatgtagctagctggtgatcggagtagcgacaatgcgaccgggagcttccgaggtatataggaaatgtacttcgaagtctcggatactttgggaagagcggtttctccagttccccagtgagcatagtcgagaatgctaactgcagtggctgcaccaagattgcaacgagcaacatggatattgaggtcatcagtatcgaatgtgcaaagatttcgctggagccattggcgctggctattggaaaggctgcactgttgacccaagcaacgcttcagcagcacatcccgaacctcgtttggcagcttgtcccaatggagatcagcctcgaagccaaggcaaagctgccgaaggagttccttcttagcccagcatacgaccgtatgtgtgttggcctcctcacgaagctgtcgagccattgtgtgggttactccaccggagacaatcgatcccgccaatgatgcatactcatgaggaacgcccagcataagctctgtgacggcatgaagcaatgtttcagcaataatttgacagtttgcgctgatatcgagacgctcgtctaggagccctcccacggtgatggccaacttcaattggtttccagtactgcagctgagagctcgaatgccgggaccgagagagccagcagaaacaagctcgatgacaatgtcgcccttctcccatgatgagatggcggtgttgataatattcttggagcaggggaacgcctcttcgatcctaagttcttctctgcaagacaacatagcattcttgatttcagcaccaggatggacacctggattgagcctgaatcgggaatcggaaggaagcagtgaatagctttcgaagaaagtctggagctcttgctgggaccattcggggtccgaccagggtgtcgtaaacgcatggaaagtgcggccaagttccaccggagagtccactttgtgtggcatacccattttggcattccaaatcgagaggaaggcaacagtccaggtagcagagccgagtccaatgatctgcgagtacagcgactccggccgacagactttgagcgcgataccgattggcaatccgacacagataccaatgatgagaggtttcagcgcatgagggccagtgaagatctttgtgtattggtaccagatcaaaccagtgtaggcgagaacgtaggagaagaaaacaatcatgccttcaaccggagtttggaaggtccaaatgagggcagtagcaagcgcaagactccagacatgccacaagaggaatctgaaaaggacccgccagtataccttgcgtctcagttggatctcttgtttctgagcgagccgaatgtcttttgcagatctgacggaaataggagctttgctaccgagggcatcatggagctcctgggctttggtatcaataagcacggctccgatcaaatagtaggcaagggcgaagccaacagccattcgattagcattattcatctcagcagtgaacttaggatcaggcaacccgctagggaggagaccaaccatgcgattgccactcagcagttgtgcccatttgtcaagaagcgcaagcacaaagtacagaacaccacatcccatctctttgctcgattgacgccaatgaacaaatgcgttgtgcagacgaagacctttctgagagttacgcagggtgtcaagtgcgaccttggtttgaatattccagccagaactgaacggaatcggcctcggaacatctgcatggcgacaataccagtcgagaaggaaattggttgactcccagtcccgggcaagctctacgaccattttatctttggatgtcttggagaaagttccacgctttgtctgagccaagacgtccttaaacagtgcttctctagccagcttgagggcagccgggtcactcatgttcgcgaatactttctcgtcatcatttccataggcagtgagataccacttgcggatctcagtatcatcggtgcggcgcacggattggtaccaagtgacccattttgaggtaaccgaacgaagagagagcaagagcacaccaatgaagacatagataacggcgagatagatagccgagtcgtggccagtccaggtcgtgatgatcggcgacacgaataggatcggaatggacataatgattgacttgcgaccagacaagaaagacgtaccagggtaactgaagcttgcaagggaggcgaaagtcgagaagtaggttgtcagagcgactaggtagaggtagaagacgataccagcgcgaggacctcgaacacctgaaatggcaacgaagccgatcaagccagcggccacagtgaaggcaataccagcgatcaggcgaatgagaacgaacatgttcgctgctgcaaaagccatcgaaatgaggtagtacgggccaccacatgcaatccaggtaccaattacaccggaaagcagcagagcgatcatcagcgccatagttgcactgtcctgttcataatcagtcatggcagcagacagatagagcccacggccaatcaaggtaagcaagacaatatcaatcagagctggaatagcgaagacactcaagaatgtgaattgctggtatgcaggcataaccttaggcttatcatcggggttgacatcaatctgagctccggcgtaggatgtagcgagctccggagcaccgttaatccagtttggtggctgatggtctccatagtaagctctgaaccggtcggatagcaacttcccgaaaacgctgggagatacgtcgaagtatgcttcacatcgcgatccaagggcaaatgactctgcgaaggcggcggcctgatcggtatggctgttgaataggggattccgatcagtcacttctgtgtaaatctcatcgaaggctccctgtcttgcggcactaaaaagcgcaagagccatcatatccacgtatgcgtcaacggagccaccttgaagaagcgagcagagaccattggtaatggcggcaaggtcatcctcacggcggtaccgcaaaacatcggagagcacactgtcggcctgatggaaaagatcaagacagacatcgagagatgggtatgtgcatccttgatccaggtaccagttgatacgcgacctgatcaaatcatcaggaggggtagatttgctgagatacccaaccgtgttcagtgctttcaactgagcaaaagaaggagcatctaccagttgcttgcgaatgtatgcgcagatggctacagatagctcgctgtgagaatcggtcagagagaggtgctgcaagagaagtaggcgctcttcagggctgagaacatcgatatcttgtatcagtcgacggggaaggccagtatcgcgagacacgtcctgggaccaggttgcgaaggtcgcctcagcctcgaggcaaacatgccgagggaatccctttgccgagaggaaggtgtgaagaatagttccagccaggccttgcgcatttttggacacataaatctcgataccatcatgatccatatcgaaaacggcccaaaatcggacatcggagctcttgcgcagaccagaatctagacagagattcacgtgcaactgatcattggatgcccagttcgaaagttccttgatggtgttggccaaatgttctccatcctcagagagatccagagagtcatagaatttactcaaaaggactccaatactttggattttgggtttcgggacgggatgaagaagactgagagacttgagacgttgttgagattggacgatttctgcaaaggccagtggggtcgcgtctgaaccgagagggaagcaaccgagcgagttgtaggccagccctgacatggagatagagagaggactgccctgcgacttgacctgtgcaacccattcaggaggatcacgcaggcgaccagtcgggctatcgggggccttggagtcgtattccgatgacttcagtagcgcatcaatggcagggaaaagtggcttgagaatatcccagccaggcttgttatccggggaaggcattatgttcaggttgccacgccaggtatcatgagctttcatcatttctgcttccttcaaccaaccgaacgcgggaagaggttcgagagtcgcgacgttaagatccgcattgtgaagagcagcttcggtgccgatccaggtaattgcactgtaaaaaccgcaccattggatagacctgcgcactatggcattaggaataatgacattatcgtcgatggtttcccaggacatcacgacaaagtctctcatgcaagattcagaaacgaaagccttgagtgttggttggagtgcgaccatttggaaataatcccgcttttcgccttcaggcatgatgctagcgtttcgaatgaccaaacccgccacggcactgctctgaacggcctttcggtctttcaagaaatgcggtggctcagtttcgagatagactgccaggccgagaccgctgatggcctcgaggagctttctgcgagcggtaggacggagcacatcttcccaatttgcgaggagaacaccggaaaacgcggtatcatggaatccgcttgtgagcagttcctcgatcttttcgatgacggccaaggctgatggatttggaggaaggattttcccgaaatcaatacgtccgagtacccggctgcgctcgtgtctggaaatagctctggcgacacctgactggaatggatccacaaccaagacatcccattcttgcaaaagtctttcttgcgagacggtaggtgggttttcgaagcttcctaggtatactccgaagctcgtgggcttgcccgcgcacggacgtctctcgatcaagttgagttctcggttggctagctgggcgatacggttggatacactcgcagggaaggtgtctggtagcggtctcgactaaatagactggaattagtatatagagcagaggggaggagcttgtcggtgttcataccttatagtatttgataaatctccttcctccggaatatacaattgaggcagagccaatggcgactgtacatatcaacactccaatgtacatctaagggagatggtcagcatatctttctttgtttctcaacgagagcgccaaaggtcaagttgtaaagaggaccaggatcaacatacgaattgccaccaatgttctttcatgccattccagccaagaggatctggcttgaatggaagatattctaccatgacgtcgggaggttgagtcctcgactcgatgtgtctttgagcgcaatataagaggcacgaggttagaataaccggccaagtggagatgcgacttcaaatgcaaatgcttataatgacatgcttaaacgagtgactgctgtgttcagcgaaaagccaagatgtcgatgtcaagaaaagagagcaccggggagctcaagtgtcgacaaggtgataaggtaaaagattagtgggggaagaatggctaaagtgaatatccacttctccaagccgcatcagtcaaatacaacaagacaattttgcctcccaggatttcccttgttcaattgtcaggggcaggaaaaacggaaagaaaattaaaagaaaaaatgtgtatacggggtagcttcgcctcttttggaccgtttaggatagaaaacaagtgtctaggcggttagtgaggtagagatctctgaaaggcaaaaatagcacacactaaagttttcgaacgcaaaagaataagctaacagatgcacggctggctgaccgatggaacagacccggtggagccagcgtagtatggatagcagatatgttgccatgtgtgccaaagccatgcgactcatatcgtggcaattatactacccgatgggccttggctgtttctcccactgtgttccaagggtctaattgaacatatcatatcaagaatgaatatgtcgtgtttccctcgagatgtatcggatttcgcctagttagtttgtagggcagttatgcacgggctagagcatcatatcatttcagcgaacaaaactcgatgtcttggcaaaggattataattaaaataattaactcaaagacggaaaagaaaataaatagaaaagattagaatgcaaaaagaaaaggaaaagaagaaaagaaaaaagaaatacaggaaaaagaacttgaaacccgaaatcggacaatccatacggtgtatgaaccggtaaatgaaaattaccccgtatctgcaagaaaccacgtaattacaagtatccgagtagcccgaaataccgtatacgccatacacacgctgtaccccgtattcagctcagacatgcagtgccttgttcttccccttccccacatcaagttctggacttgaccagtctgttcccctgaaggtaaggttcgttcctcgggaataatgcaatgtgttgtcggatcttttagccctgctatggagttcttcatgtctcgcttaccttcaatctgcctagccttgcttttgtcttttcttattattatttttagcccaaagtcgaaacaagaagcgaaaacgagaagagatttctccatgtctcaaccaatccccaatagattccattcctgaaccgatctcaggccccccggaaaagattaaacctatcaacgccagatggagactcgtataaactggatttgccttgagatccatgcgagattactccgtagctccgggattaactaggcacaattggcgataggccttggattgaacctcccgttttactccacaaacaatatactataagagctgatgatcatgcacatgtgggtaaagagctgcaagctaattcattcgttcattatcttccgtattctattttcattttctcagctgtcagttgttaattgcagacctgcatactgtgtgaccttccccatctagaaataggtcaggatcgtcatggttgccgtgccagtctgggccttgaaggtcgcatgctactacgcatttataacatgcgacactgcccccggtgtttggcctgagaacaccccgactgtcattgcctatcatcctccggtctcgactccttctagtacttctagcagtactgctgaagtgagctccactgcggtcgctacttctacactctcgttcacttcctctgcctctgtcccggctctgtcctctatcgttactggcagtttgcccacagttgcaccgaccaccactgcagcctccaccttcgttactttcaccacttcgagctcaatcgtcgactctgcttcggcatcagtcactgtcactgtcccctccggttcttccagcgtcctgactcagagtgggtcgtcgtctgtttcatcggcctcttccagctctgctgtttcgtctgcctcaaccgttgttgccagcagctcggcttcttcttctcctgtttctagtgctacttcaagtgctagttcttcgtcaatcgtttcaccgtctgaaagttcttcagtcagctcgcccgcctcgtctactgttcccagcagcccggcttcttcatcgcttgtctcaagtgtcacttcttcatcggtagtttcatcttccgcaagctcttcggtcagctctacctcgaccgctgttcctagcagctcggcttcctcgtcagctgcttcaagtgctgcttcttcgccagcagtttcgtctcctggaagctcttccatcagctcagcctcaaccgctattcctagcagctcagcttcttcgtcacctgcttcaagtgctacttcttcctcggtgattacgccttccggaagctcttccgttagctcagtcgttgttcccagcagctcagcttcttcgtcacctgcttcaagtgctacttcttcctcggtgatttcgccttccggaagctcttccgttagttcaatcgctgttccaagcacctcggcttcgtctgcttcgagtgttgcttcttcgtcggcagtttcatctcctggaagctcttccatcagctcagcctcaaccgctgtttctagtagcttggcttcttcgtcagccgtctcaagtgctacttcttcgtcagttgtttcgtctgcatctgtttccacaagtgcttctttgactaccccaatcatgtcgtctaccctcatctcaatctcggcttctgcaaccgcaagtgccactccgcttagccatgctgccgttgcagctgaaattctgattattgccagagatgctgcctctgctggtgtggccagctctggtctcaatggatacggtatcccattctccactctgattgttccctctgctggtgtcgaacttcccgaactcaatggtaccgccggaggaaacttcggtggtattgtcgttgcctctgaagtcagctatgactatggtaccctgggcttccagagtgccctgaccaccgatcagtggaaccagctatatgcttaccagcttgaatatggtgtccgtatggtccaatacgatgtctacccgggtcccaactatggcgcatctgctatcggcggatgctgtgacggcgttgaacaacttatctccctcactgatactagtgaattccccacatctggtctgaagactggcgcaggtatcagcaccactggtctatggcactaccctgcgactatcagcaacaccacctcgaccaagcagtttgccgcgtttgcccccaccacaggcttcgagactgagagtgtcgccggtgtgatcaacgacttcgatggccgtcagcagatggccttcttcattggtttcgacactacctggagttctacatccagctacctgcagcacgcatggatcacctggattacccgcggtctgcacgccggataccgtcgtgtcaacctgaatacccagattgatgacatgttcctcgagactgatatttactcgcccgctggtaccaccttccgtattcgcgccgaggatttgaccaacattgcctcctggattgataccatcaatgccaagttgcccgctggcagttcttactttgttgaagtcggccacaacggtaacggaaacatcgagaacgcttccgatacctcggatgctggctgggatacttgcggagctgccatcgagtatgattcgcctttggacactcccctcgagtggatcaagcctcttggaactggcactgatctgtggcccgccacccctactgcttacgactgggaagctacttgcactgtcatggatgagctcctggcatggtggaccaccgaaagcaacctcaacaagttcggccacatctcccacactttcactcacgaggagcaggacaatgccacctacagcgatatctacaaggagatcagcttcaaccaggcttggctcaagcaggtcggtatcgacaaggccaccaagttcacttccaacggaatcattccccctgccatcactggtctgcacaatggcgatgcccttcaggcctggtgggataacggcattgttaactgtgttggtgacaacacccgctctgcccttctgaaccaggagaacgacatgtggcctcttttcacaaccgttgccaacaacggtttcgatggtatgcaggtcaaccctcgttgggcctctcgcatctactacaactgcgacactcctgactgcaccgtcgcggaatggattgccacctctgctggtgttggtggcttccaggacctcctggacatcgagaaggccgagactatgcgtcacttcttcggtctcttccacgatccttacatgttccaccaggccaatctccgcaacgctgatgttgaccccatcaccatcaacggtgttgctgagaagtactccattatgcaggcttgggttgagacccaggtccaggagttcatccgcctggctgaatggcccgtcgtcaccctcacccaccaggaggtaagataaatcctatccaatacgctacaattcgtttcatgtgctaaccttcatagatgtctgctgccttccttgcccgtttcaaccgtgacaagtgcggctactctttgagctacgccactagcaaccagaagatcactgccgtcactgtctctgccactggcaacacctgcactgaccctatcccggttactttccctgttgctcctaccagcaccctgggcttcgctaccgagcagctcggtgctgaccctctgaccgtctgggttgagctcactggctcccccgttactttcactctttccacccccatttccttttaggatgtttcaaagatgattgaccagtctgccttcatttgacaggtcgatgcactttgcatcttttggcttttgttgatcgtccatcgctctcattcatcttgtggatatctctttagatgtcaataatggtttttatatatgtgaaggaaaaaacagcccttgtctttctgttgatacgaatattgaatgtcctgtattttaataatgcctggaaatatcatgtatactatatgatatacaatgatgctttccgaatggtcttcatacttcagtagtgtacaatataaaattagggctcaatctgtgcagagtagtaaacatcattcttcgtaaaaagcaacacaagcacaagtcctcgcatcctcggtactactctccgacatgtcatctggcggtctggcggtgccatcaataattcgcgctgcaggtccggggtgacaaagtctgcaacggttatacgagccaagggatttcctgatccgactgatccggcgcaaggcatggaaaagacttccagcgcatttcgcacggtcatgcaccccataccccaaaccaagaaaacccaaaaaatatgatttccacggatgagactaagtccaaaatcaaatcaatcgatcgtggcaaaaacaaacatccatggaccccgtttactccatacggaccagcccaagcaccagaaagcacagtgtagaaagcaggtttagagcctaacttgtctcacaaaccactctatcaccccacccaaccgaggacgccatccgggcaatcgatctggtgccaagtacactcggaaaataaagatcgtgtctcagaagccggaggggtccggtggatgtaaactagtgtaaacgcaagtggctgctgtaaatgtctgagatataccggtacgcacagagtatattcgaaattctacctagatcgtattcctgcggggtgaaggttgtagggttggcatggggcaatgtgaccccgtcatcagggtccagacctacgctacagcggggaagcatagatgttgtattttgtatacgaggggaccaatgcagccgttgcataggaactactcgattgggtaacaaggaggctcaatactaattttggatccatggatggcaccatttcggtgatatccgcttgaatacggagaaggttcctgggcattaagccacccggtcacggatttaatgtgctttagtccgggctccgtactttggactttgtgctggggtcatgtagtgatcaagaataatgtatgaataatgtatgttgtatgtcatgtaaccctccctgcttggatgaatttgggttttggagctcattctgacttctgctgctactgttgctttcgttcttttattcctgactatccctagcagcggccggtgccaggggcaaatgttacgatagatagaatgcgctagaataaaaatcccttagcgtgtatgtattctaagcgagagatattgacagagtcaccatttgatgacttgtcaaacagcgaacactggaaacggttaagcgcgatcttggcaagggctcgaaatttctgtctcgggtgcaatatagaaacgagactaacgatctcgggacttcgtataaagtcccgtggacctgtttcggttagcgggtgtggcgtccagagatttgcgccaaagaaaaatcaggcgatcgggttacatctggactagcgccatcggttgtactttttctctggtagtctattttagcgtcgaaggtggagagagcgggtcatggaggacgattcaacaaaaaaaaagtccaattcgaaacatccaacatagaataggcaaacggggtaatagtaacaatagcattgcatgatattatgggttactaccagtgttgaatactcgaggatagatgcttcgttattaaactagatctgcacataagcgtcatgcagagaagatttcaaagcatcagatgatagcccaacaggtcggcactagggtttttaaagtgactgattatcgctgtcagaagtttgtccactttagttagggctagctcgatacataccggcatttagggggatatctcgggttggtatttgcaaacccgtcttacctcggattggtaattacggggataaaatacaacaataccattttcgtgacaaaaaaaactcaactccgatttcgcgattctagactttaacgctaaggggcttgccagcacatgcatctatccgcttggtttattggcaatgttctgggaacactggaagcgcagggactttcggtctcccctcgaatcctgatgctgtccactttgtttaatgtatacaacctacaacatatatggaaataaatagccagccttggcagaccgagacttcccttttttcccttcatctattttaggcgacagatcactctcttcatccatcttggcaatttaaaattggttgccaacccctaactaagcttccatgggttgccattatctcttctcgtatacggtagttcacttatagtgtacagtaagacgatatagatcgcctgatcacatgagcagatcagatcagtaggttccaccggatctttagttttcgccccttggacttttccagtggagtcctgaccgccctcgccctctatagccctttaggcatcctcgttttcctaccaattgatcaccacctcccttgcccgttcgagtattttcagggtcttccgtccattttctgccgcgatccaaggctgagctttgcttataacgtccaggtttttccgtaccctgggagatctccaaccagcgctctgggcccttgactttgagcttaaagatgcctatctcccgaattagtgcctgctgatcacttcgtctcttcttttccctccttggccttccccatacaccttcattatatacaactaccccgcgattttgggttatctcaaccttattacacactaaatttctctcgttttatctctcatttatctctcagttcacagtccaccttaatcggtgaaatgtcgtccaagacgggctggtgggcttggtccaccaagaagaaggtccttatccttggatctatcgctcttgtcatcattgctctaggtgtcggtctaggtgccggactaggagttggtcttcatcatggcgaaggcgatgataatgataacgacaacggcggttccggcacaggttccggaggcaccggttccaatacgacaacaccaacaaacacaaccgtgtggcagccagctgttggcaccaagtggcagattatactaaaggccgacgatggcgaaccagtcaccacctcagtggacgcgcccatctacgacattgatctgttcgacaacaacaaaaccgtcatcgccgctctccagaaaaagggtcgcaaagtgatctgctacttctctgccggctcgtacgagaactggcgtcctgacgccagcgactttctcgcctcagataagggcaagaacctcgacggatggcccggcgagaaatggctgaacgtctcgtcccccaacgtgcgcaaaatcatgcaggcgcgtctcgatatcgccgtgaccaaaggctgtgacggtgtcgaccctgacaacatcgacgggtacgacaacaccaacggacttgatctcaccgaggcccaggctatcgactatgtgaactggcttgctgcccagtcccacaagcgcggtctctccgttgggttgaagaacggcggaggcattatcgactctgtcattgataacatgcagtggtgcgtcaatgagcagtgtgctgagtacgaggagtgtgatacctatgcggccttcattgaggcggacaagcctgtcttccacatcgagtaccccaagggcgatagtaccaacaataacaagtccgtgacaaccagccaggcgaatgctgcttgtgatgccaacagcgctggcaatttttcgactgttatcaagaacatggacttggacaattgggttgaatactgcccttgaatattggatactgttcgtgaataccgcctgtttgaggccttgtgcagagtgggctcgtcatctaatttggagtttgtcattgcatgtataagtactagacgtgatactttcggcatcatcattcatagcttccatcatatttcagcgtgtattaattggtcttgagaggtgaaagaagtaaattggcaactagtcacaaagtacacgcctggacacccaagaacccctggaacgcactcgtcatgtcagcacatatttcacgaacagcaccttccctccgtgtcaaattcatcacataaattccatcaagaccacgccatcggctcaaattgccttcggatcacatcaccctcaatagacggcaatgaagtgcaccacacggcacagcaactcacaagcccaaagaagcgaaaccaaaaacgccattttgagaacacagcacgcccattacaatagtccagcccaacatgagcacataatcggcatgttctacctatttaagcccgctagcctcagaacagtcacccgacatcccgagttcccttcccgaggttttcccaagatagtactatgcgctgtctccgtactcagctcctcctcacccactctatcccagctcgcacctgctctgggcaccggctctaaataatcaccccatctcaaagcaacgaccagcagcgccatcgtcggcgactcctcttatttacagccactgcatacccataagcaatagtctgcagtggctgtggctgtggctactgcgattagtggaatattatctccgggtcttccgtgcgcccgggttattcatggcgtgacatgatggagagattgggcgaggttactccgtactttactttactcaggcctggcttttgtggcggatcagccatccgtcaatagcggttatttttctttttacttacaacacggggtatcggacgttgtttatggcggaagtgttgaaatacacggatacatatacgtccgacccgaataactagtatgtgcatgtaggtaacagggacttgattccagtcctattttttccctgcatcttatttcgccaccgtatgtataattagagactagtagttcgttgtttctagactctggagcaaacaaggcaattaattacaaatacgctcttgtctaattggcctcatgaaacaaatcgggcattttagcgcactgggcgggcatgggatttcccaatggagacggacgttagattggtcttggcggtcttggcacatgaatacatcggagcgggtcgaagcgctagattgctctgattggttaggtttgagagttcattcaatattcagttaagttcgggtcgagcccctggggaagtggatcatccggtaatttttcgatcgtgtttgtgtattgtggaaattttcgaagtttcattacatacatacatacgagagtgttgatatcgttatttacgggtattttatgtgtcaacaatcagccatcgagtttattttccgccattgatctgtttgaggctgtgctacttatggacatatcataactcaaaaatcctaatgggggatcccttgcataagacccctgtggctggaacttaagtcacacgtagcgtgctactatttgagataggtacgttgtactatttttcacaatgtgctatatttcataccaattgcgagaaagaaagccgaatagtccaggatccagaatccaaaatcaagaatctcctccgcaaaggcgcttatctctagcatcaaccacattttgactgggttcgcatagaaaaaatttgcatatcgcacggccgatctcggtacttggtactccgtactccgtcggtgaacacgaggatactacagctccccagtccccgacgctcactcccgacgggaataacaatatcaattggccagtaatacgctccctttcggcctgtttttttttcccctctccgaaactggaacccggtccaacccggccagaacccacgtgtaggtatactatacccgcctaccaataacgcgcgaaccttggaacctaacctgtctcgcgcgtggtgcagcagcaagaaccaagggcgctaagatcggctacccgagtggctcgcccagataatagatctaccccttgttcctgagtggctgggtatttgtacctgtgtgtatggaactatgtgcaccctccacttgtttacattgatgtctatattgtactccgctctgtgcaaatctctgcaacgcgacccagggctgctatattaaaactaacgggtggcttgtggcttggaagacgcaatgcctcgatttggtaatgggttatactaagcgaggatatatattcaagagatgactgccttcgacccatggttgaaccaaactaggcatgaatagcctcgattgaaatgcgcgatttgaatcggtggcttttggaaggaccaaggcgcgcgccatgcgagctgaacctcaaactcggatggagacatgtatggagacctggatggatatgctggcgcgaaccgttcggaatttatttgttcagattcggaccgtgtccacccatgcatgttcgtgtagctgatcaagccgcagccaaacccaccgttgttcattagttttcccacttttgtgctgttagcgcccccagcgatcgactagttctagtgccaataatgcaatttattcagatctagctcctatggagtcgaacggccatggaagacaggactgattggctatttctctacagttttagtcagttctccccagcggctaccgggcgcaccgtagccaagagaggggatcgaaaaaaaaaaaaaaaaacctccgaaatacccggccatgccacgagctacgtatgtagttagtggcttccgccaccggcgctcgggttcaggggtatggctggagttttacaggtacggctgaagagcaagggtggggtgggcaggacggtttcccaaaactgcttctcggaccgagctaccagggaagaacctagtttctccggaggcggagatgcacgcaaaatcatctctaggcagaggatgaatattgctcgtcactgtggtattgtacattgcgccggggaccggggcgggggacggtggaaaggttcattgaaattgaaattgtcagccatgttgtcattgatgtaacaacatacgacagcatggttcctggaacatgaccccgttggtataggacaggtcgggtttggaattcggtatagccgcagttgcacacgttaaacctgcagacggagccctctgtacgttgctcatgttccaacgcagcgttgtatccggggactgagtttgccctatgtatagcgatgatctaactatgccaacggtaaatgctaatacccgacgtctgttgtctagtctgtctcactactgtttcagtccttggtctctttacaccatctgagacgattacgttggcttatattaatagctcagttctgtctcaagatgttccagttgaatatatcccaaacttgagtaaagcacgatgtccctcgttaattgaaacgttgtgtgttgcagggttattttgggagtatttccgggcttggatggcattggttggcctacaagacgccatatgcatgcctcatctcatctcatagatcgatcggatgggcggtaactcagacaatattccaaagaatcgaatggtctaaatcgagatccagaaaaggaaggcgtttgcatttccttgttgtcatgctgtcatgttgtaaacgttgtcaacattgaagttaaatcaagccacatcaggttgagccacgtttaacctatacggagcactctatgcctcgtatcaagctggccctacaactagaacccactctcggattttaatatatccctatactccgtgatccaaccatacttttgcgttgccacatgtttcaattgacaggtacttgattagtggggtttagttgtatccatggtattgtggtattctactcttggcgaaaggccgaaaggaaaagaaacagaaaaataccacaatacatactggtaatgtattacccacctgactccaccttgacctaaaaagtatagctcagctcacttcaaacaaagacggcttgaaaggatagacggggaaagagaaaacttttattagatggactaaaatgtggtctgaaaaccaactcgtagaatcattaaaccaaatgagtgaaaacatgctagctatccccaaaaaatatgtgcacatactcgcttgatccaatttacatcaccagtgcacatgaactaaagcaagtaatccaaagtagaaatccaaatcctaagctgccatcaggtcgacgaactcagtccacttagacccaaaggaggcataatagttcgtgctcagatgggtgatgtagatctcatccgcgacctttcgcacctgcttgaccagactgcgaagatccttgccctcgaccgactcaggcaccgagtggacgatggcgcaaagttgggtacgattgctgtccgagatgctgctgaacagcttagcgccttgccgttcccggaacgtgctgtaggcggcttcgaacacaacggttgaatcagctgtagccaggtaccgagaatccgggacagcgccggggttatggacaacctgatagttttcgttagctcaatggacttcgcctatgtatcccagatggggaacacatggtgatgcaggccggggtggaatatgcggcgttggaatagaattcaatagagccatagtttggcttgtgcatggcccgacgggagggaaaacggaaaaacagataaaacaaataaagaaacgcggatatagggcgacgatgatgcgagacaggggtggtatggtatggggcagtccataagtgtaaagtaaaaacattacagtactcacaaattgatcagggccaagagccttgagacccttaacgaaatctgtgagcccttgcagatacgtcaaggtttgagcttcgtattgttgaggagtttcatcgaagaagattccgcgaaccgcaaggttggggtcggaggaattagtcggccagtccgcataggtctgaatatccttgcgaacctcagaagcattgcgctttccataggaggtatacacatagcccaacacccgcacattgtcgtacgcagtgagtttggggatctcgcgcgtgtaattgccatccgggagagagtcagggccgggaccatttcctggattgattacgacggtaaagttgacatcggggtgggcggatatcctgtggcgttcagcgactgtttttctgtatttttcctttcttttctaatttgtatataacggcgcagcataatgtggctggctaccaggatagcaatttggggagagaaaagaaaggataaaaagggtttagaaacatacacattttccagcggagcccacgcctcaggagcagggtatacgtagagtggaacgaacaccttcgccttcggacccatgctatttttcttgtggagggtagtgaccacaacggaggggacaacggcgacaataatcacaatcaggaccacaattgccaagatgaaacgagacaacttcgacttcaggcacgtccggttgctcacgtgtttctcagtagacataatgggggatttatagagagaaagttgaaaagaatgaaagtggattcgcgaacagcgccggttacatatgaacgtgaatttttcagagcatggctgtctgaaaaaaaaaccaaaatggaaacaggttgatcaacacgacctaaggcttggaccctacggtcgatggatctggggcgaccagatgcagtaaggtgtcttggccaagacgtcgaaaaaagaaccgaaatagagcaaaatcgaaagaaaagatttaataaagaaaaagcgcgaaagaataaagaaatacaagaataattccattattatactagctcgagaagccctgacgtactggtacggagcacggagtaaagatagaggcagttagggcatgcgaatgatatcccaaggtccagccgcatgtctggcccaccaaggggcatgcctggttctgttccagttcattgtgccccctcttgcactcgctttgtgcttttttttttttttatttccgtttatacttaggtccttttctttctttttccttttatttttgccgggggcccgtgctgaatcctcattcgtcaaggaagatggcataatatatgaactcaaacagaggatccgatcgagcaacgcaggtacctcgcttgttttgtataaaaccttggtggagggcccaccgaagaatcgggatatcttagtctggtcatataaaaacatagatcattttctctctttgttcgcagcgatagcataccttccaaggttacctggcattcatcgtcaacttcccatcatgattgctccaacatcattctcctcgtcgagatccgacagtcctcataggtctgatgcaagcagtcctgtgcagtctcccatcgccctggatacacctgtaacagaggctggagacccattcgacaatctccatgacttgttgcgcagagtccctttccagagccacattctggtcactggtggcctcggtttcattggtagtcacaccacgcttgagctgctcaaggcaaactataacgtcattgtgatcgacaatcttagcaatgcattcgagaatgtgttcgatcgtatcagcctcttggccaagaagcaccacgagaggaatggaacgaagatgccatctctgcggttgcatgcacacgattatcgtgacgccaaagctcttcagccgctgcttgaggagtaccgcctcccatcccggtggggaactcccaagtcaagaatcgccggagtcattcacttcgcagcctataaagccgtcgaggagagcattcggaagccactgaagtattactccaacaatgtcagcgggcttgtcgactttgcctcaacactcggagacttcggcatcaagaccttcatcttctcctcctccgccaccgtatacggcaccctcgccacctccggtcttccattgaaagaagaactgtgtgttcacaaggaagaggtgtacacagatcacaaaggcacacaacagtccatccagcctggatgcacaggcatcaccaacccatacggacgcacaaaatggatgtgtgaaaccatcctcgccgacttggccgcatcagaccccgaatggaccattgttgcactccgctacttcaaccccgttggctgtgattcttccggtcttttgggcgaagacccaagacaggcaccaacaaacctgcttcccgtcgttgtcaaggtcatgaccggccagtacgccgagctctcgatgttcggtacagactgggaaacagaggatggcactgccgtccgtgacttcatccacgtcagtgatctggctcgtgggcatattgccgcgctcagctcggccaacgagggcaaattgacagaaaatttccgcacgttcaacctcggaactggaaagggaaattccgtcatggatgtggtcagcaccatggagtctgttatcgagaagcccattcctcgccgtgccgcgcctcgtcgcgaaggtgatgttggagcttgcgttgcggtcgtcgaccgctcgacggaagagctccaatggaagacagaaaagagcttgaaggacgcctgccaggacatctgcaacttcttggatgtcagtggtctgtcttcatagcgcgttcctcaaaactcctggtccgatatggtcgttttttttcttttttttttgcttttcgcttgttcctaatacctgctcaccgaacaatagcccttacgaggcatgtgtttcagtataatgattgtctgtttttctgtttgtttagcatgtgcatagagttgcatgactcgccgagtattctcggtcggtctctgtgatattttcccccttgggtgtacagagtcatttacatacgtcgctttgttgctatattcgaattgacaaaagttcccatttgccatttgatccttgaattgtacaggttctccgtgaatactgctagtcgagaactaatcattagttgttgacaggatatggtgcaaagatgtgtgatctcatgtgccagtacactttacacaaccggtttggacgtctggataggagatttcggggtttgcaggagacggaggatattaatttgcctcgcatgtagtctatacacgggctagatccttgtagcaagaaatgaagctgccctacgtcgttgaccatatttgttgatgcatcacgtgactgatctcggtcttggcatcaaatatggccgcagttttctgcgacagccttgtccgcgcgtgtgttattgcatcttcaatgcaattgggatttcttgtcgcctaggaccttctattgaacgtttcaataccgtcctattctattccctgtcttctctgattgattcgccacaatgatctgcaaaagctgccgcacgacaatgctgtcccgattcaaccagcagccagtgatccggacggcttcagcatgtgcgcgccagctgcctctggttcgcagccaattccgctcatacagcagtgacaacaacccacctgtggctgctcctccttccccgtccgcccccagacaacccacggtcggcgacctcacaactccgtccgccatctcctccgctacccccggcatttctcagcctctgagcacgcccgaaggtgtccacactgatgtccaccccggagcttccacacatcccacttccgtgcgcccaccgagcagctgcccagccggaaccaaactgaatggactcaactacttcaagaacaagccggatgtcttcgccaaggaggattccgagtacccagattggctatggaacctcttgggagattccagcaaggaaaagactaagcagggtggtgttgacccaagcagtaagatacctcctagaaatcccgtttgcctatgatgcttaccccgtcgcagccttgaacaagaaacaacgaaagcgttacgacaagaagctggccgctcgtactggccccctcgctgctaagatccccgcccaccacaacgctcacgatatcacccccgcaccctacaaccgcgacgcaccttcagcggatgccatggccgatgccaccgagggctttgagcggcgttcggaaattatcaggagtgcccgcgacgccagacggaaggccatcaaggagtccaactttctgcgcggtctttgagctgttttgtatcagttcgagtggaagggatttactctgcttgttggggttgtgtcgcaggcgctcagaaccacctcgattttgcattggatattggatagcctggacttttcggagcacccgggatgtattattacattgatttctttttcgattgtgctatatatcaatgatattgtctcagattaagttcgcctcggagtaccccgaacagccacctctgtctcagaaagtcgagatacataatctattgggaaaccggccactccttctcctccccttgcccttcaagccaggggagacaagcttcataaaatgctttcaactccccatccccaagagcaagaatcttctcaaaggtaccctggtcaaagcgctcatagaaacccaaaagtgaagcgagaataatatccgcatagccagccttctcaccctccaaaaacggccccttcttcccctccttacccttcagcatcttaaccagtgttcccatctccttctcgataagctgccatagcgcaagcaactccgcctcacccgtcggcctgacctcagaaagcggcttcccgaacgccgcggagcgcgtccggataaagtactcccgtccacgctcatccagtccagatggaactctgggaacgatcagcgacttggtactcggtgcgatcagctccacgatcttgtccacggcgaccacgagcgagtaacttgcgtcgccggaggggaagagcgggggcgacgggtacagcttgtcggtgtacagggcgatcgcctcggattccattagcacgccgtcttcgttgctggtaattgatcccttgtggctgattgccggtagtgtgtagggtgtcgttgacttggcgggtgggacgccatgcgccttgagtaaaggtgcgatatccgggtatgagacccagctttgggtgtaggggatacccttgaagttaaggaccattctggtccggagagttctgggagaccatgacttggaagtgcctggttagattagttatttgtctgtctgcagtgagtcatcgtctggtccgtacccggtaggtctgataggagatcgaagaaatggattttggattcagtcattgtgtaattgtagattttgtatctggtttagagttgaagtcgtgctttaaggttgaagtcgagttgttgagttgttgagctgttgagtatacatgtagttctatttatacagccctggagacgtcggggcgggggtttgatttatcagctgaaattctttggaagcacagaaaagaatagaagctgatcaagaggctttcctttcgttaatacgctgtgagtatactttcatcgaggctaagctgcgagaatgaaggtagtgttgaataaattcatatttcatatccaactaatagatacatcaagtaattcgaataccacagccaaaagtctcacttcatatccacgatatagagagcgccacgttggcggggagctggagcgcacgggtcacatggggattttctcccgacatcaacggtatgttgtctctaacacgacgtagttcataaatccaattctccatagaaatccacaagtactccagctaagcggggcaacctttgccaacaagcccgcccctccagtcactacccaacatccataaggttgcatctcctatacaacatacgacatactccctgctggaaaagaaagctcactgacaatataccagtgaaagatggagcatgtcgaagttctcgtggatcgtgctaaacagctagtactccacgagccacccagggcacaaacacacacacacaccgtggacaaattccacccatctttggacgatcatatccaggagatctacaagtctgtcaatgcatatgctccgactacagactatttcctcaaggaaatgcagcatgacaataccgtcgcagattctcctgagcccgtcaccgatgctttggcttcgctggatgcatttcgtgagtacatgaaaggtgtgaacgcgtctgcgatgggaccagaagaagccctggatctttccgcgcctctttcggattactttatctcgtcaagccacaacacttatttgacgggtaatcagctgtacagcgacgctgctgctagtgcctatacatctgtgagttgatggttgcagaatagtcataccattttgatccatggatgttatgatctccaggacctggaattgaaaatttactcatgttccaacaggtcctcctccgcggctgcagatccgtcgagattgatgtatgggatggggaattggacaccccaagctcaagtgacggcgggataggcagtgacagtagcagtgattcagagactgaaaaggggaagggtatgaggagcaaattgaaagaaaagatgacgggccggaaaagtggccaggagaaaattggtaaaggacataaaaaatccttatcctccaaattggaagcgaaacttgatggcgtccttcgtcgcaaatctgccaagtcgcccccgcggccattggacgaagacaccgcgacgagccatatgcctattccggttgagcctcgtgtcatgcatggccatactctaaccaaggggaccacattccgtgaaatctgctatgcaattcgtgacagtgcatttgttgccagtgatcttccagtggttattagtctcgaggtacatgcgtctctcgagcaacaacagacgatggttgacatcatgtcggaggcgtggaaaggattgctcgtggaggctcctccggatggagagaagcttcccttgctagctgagctgaggcggaagattttgatcaagagcaaaggtgtcccgctccatggcgaggacaagaaacccgaaggagaacctctgacgccgcagaattccgaggaaaagtccccgggacaacatccgccgaagcctccaaaggttcttgaggctctggccgagatggctgtttatactcgcgcctatcatttcagtcatttcgatcaaccaggtatgtatcattgtagatatggtcatgaaggcaatgctaactgaccaacagaggctaaattccctcatcatgtgttctcgctgtccgagaaagcagcgcgagaagcccatgccaaccatcgcgaggccttgttcgagcacaaccgaacatctctgatgcgtatctacccgtatgcattccgaatcaactcatcgaaccttgatccaacattctactggcgacgtggcgctcagctagtagcgttgaactggcaaaagccggacaaaggcatgatgcttaaccacggaatgtttgttggaacccacggctggcgactgaagccctttggctaccgcagcagcaattccccgatagatatcatcgtgcgccacaacttaaccctctcaatcgaagtattcgccgcgcaaggcctctctctcccaccgggcgaccacagcgagaagggattcaaaccctatgtgaactgccagctgcacgtcgaagaaccggacggcgacatcaccccgggccaggacgatgccagctccgacacggagaaaagcagctacaggcggtgcacgaagagttccgtaggttgcaacccggacttcaagggccagagattggagttcccgaccgtgatgggaatcatcgaggagctgagtttcctacggttagtttttcttttctccgagattcccccttgctgcttctctacccctcatcacattcgttttcaagtatgcaggcataaaacctgcattgtgatacccgagaatatatgcactttcccgcatcacataatcatgacgagtgggcttgggatttgcttcttccagacttcccacttggtaacgttatgcattatgcactatccactattgggcttagggttagcagggcgacctgtggctttccgcagaatcagctctacggagtcctatcatgcataccaccctatgcgttccactatctacaaacaagaaactaactcgggtctgccttcctttcttaggttcaaaatcaaagacgacgaaatcggtcgggatgcattagctgcgtgggcttgcgtccggcttgaccggctgcgggagggttatcggctgattcatctccatgattatgccggcgagaaggctggcgggatcttgctggttaatattgtgaagcgggttacttgactgcccagatgacgttgtcaccgtgtatttatttgtttagattgtcggtagtatagcgataaagtatatcacaaattctggaattctatattttacggaacagaaggccatcgaaggaaacacagcgccaggaccgccgagtatcttcaagcagggtttgggcagcatgtcgtacagcgcacctacgcattaggagcatgcggagcaagaaaatgtagcaggaaggcaggccgatatctgataaatgtgacaagtccttcgacatgtgtatcacaaactcatcccattcattttgacatgaccccaaacggcaggctacatattaggatcgctaccgaagtgcaatctgcccgtcagcatgcatatctgactcgagaacgtcacacagaagcaatgacacttcggcacttcggcttttgaactcttctcttctaacttcgagaactgcattgcagagctaaggcgcaacaatttcgaagacagaaacaactagtctcggccttacaatttctcgccaagggtgtctgaataaaggcataaaggccgagcgcggggtagatcatgtcttactttagctaggcggctccgttggcatcgaagtgggtgcatggagaggtctgtaggctgcctgcagtgtcgtgctggcggtatatatcacgttagaggattcaattcttagccgcatgatatgcattgtgccgatgccgcgcatgggtaccattccaatatgttggtttccggaagagcggctactgtagatgtgcatatcgcaatccgtgacttgggcgatatctaaatcgggttcatttactaggttcgctatgtacgagaagaagtagcggtgacggatcagacagactcgggcgtaatggtgatgcatagaaacgtggggtagttgtccagccctggacttcgaagcatttggcctattgatagtatagtacgtgggtggaaaaaatggtcttgcatgctgcgagccatagccccaaccgtggggttcgtaccagaggaggatcggtgagaccgagagtcaaatcactaggtacaatatcaccttagaagggtcaaggcgccaagttacatgcatcagattgatcaacatggctagtggggactagcagataagtcaagttgaccggtaaatcctccgataaagttgtggccaaagagggtcacacgtcggctgaaggatcgcaatatgagacgtctacggttgtcctccgattgcccagggcctcaacgaatacggagtctggaatagtcggtgactcaacgatagaactcgacatggttcttcctaagcaaagtacaatttgtcatctgacagatcctggtgcaggggttcatgcgtcacttccacaaaatttgcatgcagaacagagtgataatcggcctttggcgttggatcaaacgggctagaacggtacggccaatgatcggaggagatcgtctttttaaggaatggagggaacccacgttgaaggtcattggccaatcacagcatgcctcctaccgaagatgaccgaacactagccctatctgggatctgccatcgttctggggttgatacgtcaactcttgaatgtgttgagaagttgcaatttcctcgtctccccccttttgcttcgaagtatcggtgaattgatgcaagttgccgagacccgctacactcatttctttgtctgatttctttggatcgctgatcccttagccttttggacgaaaacatggtgaactcacaaggccggaggcctcgggaagtaccgacgaagccgctgtgattggccttggtaggctagtggcgtacaaaagaggatcatgatgacccttttttttgggcacaggtacctgtgcaaaaaggcaagcccgtcaagacgaacatccatctactgttactggctgatatcattgggccaaacaaagaagtgactgccaggtaagtttttgatattaaatttgagattacaatattattatttccatattaattatttttacctgattagccaatgtgaactagatctattcttctctttcgccttttcccttgctttccaggccttataaggacccctcctcgtcctgttccatggccttgtattcagacttcaacctaagacagtcctgaacatcctcgggcttcggcaaagaactctactcacaccttctctcctcgacgtctatccaagcaacatgtgttccttcaccaaatgtgctgcaccagtgtgctctaactccgctgtcatcaccaaggtccgtacaccttactcctatatcgatgtggtacttccagcacatttacgaatatactaactatcaacagatgcctggtgtgcgatgccccaattgccaagcacaggggaaagaagtctgggttatcccaggcaagaactgtcacatctgccacaccccttgtggttgataacttcgaggtcctgtgctgcacatctatgggggaaaagaccgtgcagtcaaatctgcccatgctgtccggatatgatctgattccacacttcaacttcatacactctcccggtcatatgggcattccctcttgaatctgaaggatgaattcaatacgtctaacacacgaaaggcctgcgaataccttggagattgatacacttatttgggactgggtgaaccccaggtggaaggcgcaaaatgttctgtcgtggtgtttttgttactattttctttagcgttttctgataatgagatatgacaattcttgattttggcttttcttcactagacgaaatggtgctgttcttgccatcgggccgagtagatcagacagactgaagtgccactcaggtaaactttttaagtacaatctagaagtagtaggtagcccacgtgggagttcccgggttatatgacatcattcactcatagcgacaagagtgcacgcacagagtaactctacatatatacgggaatatagctatgatacatatttgactccctctggtgtataagcctttgtaagctgacgcaggaaagcaagatgaggttctatatgccactactcctctaagcactatccctataaagtcatgctaagactgtacttcggctgcaataaagcggcaagagatacaccccaaaacagaaaagaacagggtgcgtgacctggaaatttatccggtccatacgtatccatcgccttcaacttccatctcatccacaaagaaagcaacattacaaatccaagccagatcaccatgacggaaaagtatcccatcggcacacgcaccgagagcgagcgtctcgtccgcgagtgggggtttcgacatatcttcacctggacggatggaaggtacgtatagttttttgttagaatcgatacatgatacacccaaaatgaaacccagctggactacggcagcaaaacgttctctcatttgatgtatgcattgatgctgactttattcagcaacgcccattattccccgcactcgcatggcggtctgacgacacatcttattcgtcgggggtctctgactatcgcataccctgatgataatgcggagcataatggggaagctgaaaaggtgacgtttcgagttggggagagggttgatgttcctgctgggaaggttcatgaggtttggattggggatgaggggtgtgagtatgtgattggagagtagaaggtgacttttgcttttactataaccattgtttctactgattcggaaattcgttgataaatgttgtgacattatgccgataagctcagctcattctattctaggtattgaatattttttaagtctacctgtgccagacaatgtagtcgtgtctctagtgcaagaatcggaaatcaagtctgtacgggcattagtactcagttgcacagcaggagacaacttgaaacatacctcttgtttccaagatccttgttttcaacgacgtatcgtgagcgctcttcgctggacattttgtcccagacagcggcattttgtctagaagggaatattagcaaaactattggatctcacagtacgggctgacatacttgttacgccacacgtagtaaaccttggcaaggatgaatatcgccatgctccacaccgaaagagcaataaggaccttattaccggtgtggtagtacggcttatccggggtacggtagacctatgtgatggttagttatgaagactcgagaacaaggaaccggaaagactcacgttgttaccaatgatgttactagcctgcaccatcatgttgtagatagcagtagcaaccgttcgcgtcctcacagagcctgcattgcgggatgtaattgcgacgataatcgcgtgcacgtaaggcataccaatcaacaagatcagcagaacccaacgcacccaaggactagcactctcagatacagtctccaacgcgatcaacaggaccatagcccaaatctcagcaccgacgccaagcagcagtcgctgattgaaccgctcggaagcccaagtccacaatagcagattgataatgaagatcacataggccgggatggtgagcaggttggtgttgaaagtactgaaaccaagcgacttcagttccagactgatgtacgacgtagccggtgtgctggggatcatccaggtcaggccaagcaggtagatgagccacatgtcgtagtccttcagggcctgccagagcagcttgggagtcacggcctggcgattgtgcatggttcccttactcggatcatcgcgcaggacacggttgaccatgattttctcttcgtgctcgttgaaccagcccttcttaccgcggaaccggcctgcggtctgtgttggcgagggcggcatatagaatgcagcgacgataccgatcagtccggtgatacaaccctccagggcgaacaagtatcgccagccgccggtgccgtccgattggcgaatgtggaggaagccaaatgcgaggaaagcgctgacaatcgcggtggcttcgtatgtcatccagaagtagctgagtcggataggcagctccttggacttgtaccagaacgataggaagagaatggtgtcggggatgaagccaccctcgaggagaccgagcatggcgcgggtcgtgaagaatccggctctgttgtgcataaatgcctggcatgaggcgatgagactccagctgatcatttgcactggaatccagcgatcggggccgacccattttgaaatgagctgagagggcagctcggcgaagaggaatgttaggtagaagattgtttggccggtgttgtagtcgtttgtggtcatgcctagatcgtctagcatgttgtctgacgtggcctggacgatgtttccacggtctagttggagcgcaaagaaagtcatacaggcaaatgtgcaaatgcgccaatcaatctgcgaagggtcagttacttgaacagaatacgggagagttcagtaacccatacctttctgacaatggctttctcttcttcctctgtccactcaaagtccgggtcccagcgatgggcaccctcatattcaggaatgggcttgtagaaccgcgggtcctcggttgtatcaaaagcacagtcggtctgcttggcacgagggctgtcatacgtcgacgaagacgaagactctgcggataagactttctgggtaggcttagagtcaataggcccggcatcggatgccgtcttattggcgtcttcaaccgtcatctcgtatgggattggaagtgagattacggatggagaaaagaagcattgcttgggctgggcatttactcatataagggaagactcatacgtttatttatcacgccatatttggcagatgtttcgctttggcctgtgcaggatgtggaccaggcgaaaaggtaaaagtcacaacatcgagggcagaaagttgtggaactgcgatgatcctgggcgatttagagtcaattagggttgacgagattggctaggttggctcggttgacttagggaggcctagcctggaactcagaagggcactctacaggatagatagggtagacggggaaagtttccagatccaagagatttgttgaagaaaaacagacggaaaggcgacgttggcttgaatcacgcaagtgtagtgggattgacgttagagtcaacgagttagcggagtcaaagtcagcaggggtctcgcagaatgaacctgtttcatgcagatcttcatgaatgcgagttagcgttgaataataagtattctacgaactcttgtatgtattcacgacaacctatggtgcctctacgccgtaccctaagtcccttacatgttccatatctagaacattgactaactatacaactataactatggagataatataactcctaactataataaatagaaaatatcgcgccaagccagttgtatatgacgccatcagcagcgtatctcgcgtactcccacagcgcaacggtcgactcgttttcttcagatcacggcaattggcaatgcacgcacgcaattcggctatcacgtcattcccaatgcgacgcttatctcgtatacatacaataagagtacgtacctcgaacctcctcggctcgctcgctaaattgattgtatgataacacaaagttgacacttttctgattgtcccgcaaaaaccgcaaaaccccgcaatgatggcgcaattcgtgtgctcggtttgctggtgccgaaatagatatatattgccggtgtaaacccactagaaaagatgaagaaacatatctgatccgcagaggcaacatacacatacctcgcaaactcaaacatggctccctccctcactgagacagtaggccttcgcgccccgcctgttgcgcttccgctcaaggcggacggtggtttcaacaaggagaacttgatcggctacaagattgaaaaggatgttgagattaagggcacagacaaggtggctcctgtatcttatccggaatatctgcctgtttgggacaacgagacagaaaggtatattggccttgatgatggcttcctaggaataccatatctaatagacatctagatatcctcctctgacgccctttgagcactacgaccacggcaaagacgccgacccctctttctcagaactgcttcccgagggagtccaagtcgaccagctcactcccttcattggctctgagatccacggcgtgcaactaagccaactctccgacaagggcaaggatcaattggctctgtatgttgcacagcgacgagtcgtcggtacgtgacagcccttttttccatctccatctccaagcacggatctaacaaaccatccagccttccgcgaccaagacttcgcatccctaccgattcaaaaggccgtcgactatgccggctactttggccgacaccacatccaccagacctccggtgcccccaagggattcccagagatccacctcgtcttccgcggtgccgacgaccgcactggcgagaccttcctgaagcagcgcaccaacactatcacatggcactcggacgtcaccttcgagaagcagccccccggcacaacattcctgtatgcgctcgacggccccaccaccggcggcgacaccctcttcgccgacatggtccaggcatacaagcgtctgtcgcctggcttccgggaacgtctccacggattgaaggccgtgcactccggcctcgagcagatccacgctagtttgaacggtggtggtattgcccgccgtgatcctgtttcatcggagcaccccattgttcgcactcaccccgttactggcgagaaggcgctttacgtgaacccccagtgtaagtctgtctcgacacttttgaatgattgggaaagctgacatgtcgcatagtcactcgttacattgttggatacaagaaggaggaatccgataaccttctcaagttcctgtacgaccacattgccttgtcgcaggatcttcaggctcgtattcgctggaaggctggtactgttgtcgtttgggatgtaagttacagcctcagcctattctttcaatgagaacaaaagctaaccttcgcagaaccgtgtggcttgccactctgccgttttcgactgggaggatggccagcgccgacacattgctcgtctcacaccccaggccgaggctccctatgagacaccctttgaaggttagatggggcgctggaagccttcgaatttaaaataacacgtcgctatgataatcccacaaattgagaagaacatcaatgaataatttgaatatcatgcttgcattatcagcgtagacctgtacaaacatagtaatacgtcggtaatctctcttcctctgtgccatacatacaaaaacccaacaactcaagccttctcgcgcctgaaccgactcaaaagcccaacatgccactcgttaaaacgcctagcagagagcgggagcatctcgttactcttagtcaacgcctgcgacatggcttcaaagatcatagacggcaactccaactcttccaccgacaacggcgaaggattcccgatttccggatggagcagctcgtccacatcaggagcctcttggtagaacaccttcatcgcttgctgggccatgatactatcgcctgcgctggaattcgagtatcgcatgtctgggttgaagacccacagctgtcaagtagaatatccgttagtgtcatttctagaatttgatatggctcaaattcgggagcgaataggaatggaatagaatatcacctaccacgagaccgctcttctggccacaatgaacgacgaatcgtcgggcgctttctctctcgatcaattcgaggagctgtgcagcgacgattgtttctgtcgggtggacctcccactttgtaatgtctgcatcgctggatgaattcgtgttcagggatacgttggctttcagaagtcgccatcccttggcggttggatcttccatgccgataatggaattgcagtttgtgcagtcgagggttcgttgtggtgagagtttaatgttcgctttgtgctcttcatcattgccctggattgcatgcttgtcagtacgttgtacctgaaacgcgaaatgaactattgcgtcgaataatacttgtaaatgaaggaaaaagcattgcattcaaggtcaaggttatatagagcacatcatgcaaggaaaaataatatatgtaactctggtaatcacgcccgctccactgcttagatagccggcgctgaaaatagagaacaccctgagtcgcagaacaggaaaaagcggctcacacaagtccagtatcgcaaacgaaaagagcgaaatccatctggttagagaggataactaccccccgaatttgtgatcctgttcctgtgagagtaccaccttcgcttgaattgcagtacacaaggtgcatttcgtccatcttgggcaattgtatcggaggccaccccactgataactgagtggtccccttctaagttgcccggttctggggataaaaagggggaaatgatgatgggaagaagaggggatgtataaatcttacctttctcaatcctatgcagtctgtttcagcaaggaggaaagtagcaacatcaacaaagaccgtcccggaaacagccacaacgtggctatccgcaccataccctttagtctgtgcggtttggtcctcaatctcgagcgcagtgtctttctcctctttctcgtgatctgcatgggggtcaggtttgtggcaatgccagaaatccatcatttcagcccagttcccacttggaaggtctttccagatccaccccggggtagttccctgattaaccgactcggatattagcgagggatcaagaaaaacctgttcacactctcgacaacgaatacgagtcgaagacgacatttcatctgctgtccagggtgtgaattcatcaattagttcatcccgtggcgccagcgcctcgtcattgggatcgacctgcatgcggaaggaataatcatggctggggttcctggtgccaccgggatagttggtgctactggaatccctgatgccactggaattcctggtgcgactgggatccctggtatcactgggttccgatttcggtactggcccaatgggtgtttccaacacacgccgggatgcggcgctaacgcgcgcgggcagtttgattgtttctgtgacatgtttaaatggttctggtagggagactgtgactgcttttcttgattctgaaagttggatatctggtcgaattccgtcaaattgtgttgtctcgggaagtgacacgtaaagagttatctggcggatgtttggtagaaattctgcgtgtagatagagggggatatcggcatcctgcattgcagatgttgtacaagctcgaatgtgtgccagacagggatggtgcttgatgccccgtcaaaaggataagacgagagagggtgagcaacaggggtgattatttagcaatcatgtggagctggagtttctgactgtctaaggccatgagaaacatgtcgcgcttagattatttggacgttaactacgccgcagtggtggatgtcatgaccgcgtttgtcaaatgcaaacaatgcaaacaaccttgggtaccttgggagccaacatctacacgtgaccccatgtatcgcttcgtcgaaatgaagaaacgatcatctatcaatttattttcttcgattattcattaaatcgtacataaatttgagttaagtagagtatgaacaaagcctacagatcatatccgacaaaattccctccccaacacttgaactcagtcgcaaatcgcacagcagccttcaagaagaagctatcagaatcgccccaagtcgaggccagttccttcagtgctcgagtggtcttgacaaagtacacatcggatgaaaattcacccttgacagctttctcggcaacccatttccagtcctttccattcaagtcataattccggatttggtccattttgatctcgggccgcagttgcgcgacgtagatgcccacacagatcaaccaccattggcgaagaagagagatttgaaactggggaggaattaaaggcaacatgacacggaccgcgtggctggttgcgaggttcatagcgaagaaccaatcgtaattcccggccgaatctgctgtcccaactagcaatgcagctgcaagctcttggctctcgcggaactgttcaattggattgtcgatcttccatgctttccagtgcttgagaagcacggcgttgtggctgacaaaaagggtattgaggttgtcgtcgccgggagtggaaaagaggccatctaagtccttatctttccggaccatgtcaaatatttcaaagagtgactttgattcatattgtacctcatttttcgagagtttagggtcctccagggacttgtatatgtcgttgtgacaggttgctgcaaggccgagtgcctccattgcaacttcacgactgtccatttcaaaggcgtatgcaagatgaatcaatggcaatccaactagacagatgttagagcgtgatccccccggaaagctgaaaacatacgagaagccattatagaatcaaacatgggctctttgccagtatacaagtattcggccacaacttccttccagtcatagctgcggtgaacgacttcatcttcaaaaaaatccacaaaggctcgatcaaatctggttggcgttagtgaggggtcccaagttggaaaggcccagacaagcccagcaacccaccctcgccgtcccaaatgacctcgccaatcaagggtagtaatttctgccggtgaatccttccatttgactagaccagacacttcatgctcgtataggcagcctaaagtatcggcatctgcgccttgcagaaaggaggagctcaagagctgcaagcaggtcaatttcatggactaacgagtaatccatacataggaagctaatgttactaatgtaattcaaatgactcacatgtattaactgattagggaagttccgacggtcgaagagcgagttctcgacatggttcaattttagtaggtgcttgaatgcccgagctgccttgtcttcagctgtctcggtttcatggacgtggacagggggcagatcgatcgcctgagttggcgtggacgagaacaggccaagcgaaggcagtgatggccaccgaacagtaaacattttgctgattagtgaagctatgtgtaggcgtttggatgggattgttgggaaagcgtcacgtgaagcagaacgtcgtatgacgtaggaaatttaggttatcaatctggtgacttctggtcacatgacctggtgaatcggacgacttccagctactcaccttgcttcagatatacaaaagcattttttgatgaatcagacgattgggtaaatcgatgctttcggtatattccagaaaattgtattattttacgacatattactatttctagatgggaaagagtgcctggattgagggatattccatatgaaaattcatgattttgcgccataatttacattgcatgcatatcctgaccgtctgaaccttacgccttatgatgttcaaccattggaatcggctgctccggctgagcagcaacctctccttggaagacttccatttcaagacggggaccgacgaaattcttgcgtccatctaccatccactgaatgaaagagataataaagacaataccaaatgccgcaacacaataatctgtcacatcgaattagctttatgtttttgcatcaaaaaaagagagtcaactcactcatgttgctaccagtggcaggcagctcaggggggaagaggaagaggatagtagtcagaagaatgtacgccagcgagatctgaggttttgagttagtaataatttcagtgaaccgcagggaaaggtatcatacgatgttgatggtccagccaacaatttctggcaggacgaatgagcgctccggtagcatttttcttcctcggcagcagttcactgcaattggcattccatatgaaaggccgagcaacaccactgacgctgagacaatagcattgaaagcacttggagatgttagcaatatccagggtggagtgttatgcatatgcttacctggatgagcccaagaagatacaaccgaatatgaccacgagagccagattgagatataatgagttcaatgggacgtttagtttggggtgaacacgagagaagaagggagacgcagggagaccgccatcactataactatatcagtataatgaccaaatttgaaagatgaacaataacgtaccgcgcgaaggcgtagaccatacgactgctagtagtcataatagcgattgcagcgaataaagcgcagactagggggaagctagaaaggtgtcagtacaaggaagagacaggagagcagtgacacctacatcaagagacagatagcgcctgcgttgctcgaagtggcattcttcaagattgcaagcagcggggttgcagcagaatcaataacttcgttgatatcgccagccacaaagagcagcacaataaggaagatggctccagtaacggtaccgatcacgacacaagcaatcatgatcttgggcccctcaaccgagggattggggatttctgtaatccattagcctcagatccatatccaagtgtaaactcctggaagttaccttcaatcatgtgggcgacaccgtcaaagccggtaacaccaagaccaccttgcagaagctatgaatatgttagagatgctcatgaactttcgcacgaacgacataccccaagcaaccacgcaattccatcaggccctataacagtcagtttgagagcatagttagataatgatcggtaagacttacagcctgtttcgttgatgaagtcggtgaagacaaatctgttcattgtcagtgatttagttctaggattgtcgagcagacaagacgtactctccggaattatagttaggcgaggcacatgaaagtacagtaatgcaaatgatggcaaatcctgacaaagaccagatgactgtgggaattagtaagaagtctccgacagctcggtatagggtatctcacaagctgccttggtgacatagggcataatgttgttcataaaggcattgacgaggaaggcaacgatattgtagccgatgtagattaggaattggtgccagcgctgggggttatagctctggatatggaagttagtcaaagatatcaacgttatagctcagaataacctaccgggttcatgagagagatcacacccagaataagctgactgcccaaaagaccagcagttgcgaccagcgcaacccagccagagcagttgatccagccagtgatccaggagagaattggcatccattttttccacgaagtcacagcgacccagtgatattggcctccggcagtggggtatgcagaaagaaactcggctagggaagtggccatgcacaaattacagattccggctgtaataagacctattgagactcgtgtcagctctggattgagaatcgacagagagccaggcggatacgtaccccagacaatactagtgcttcctcccgagggtaaactgagagacaaacttgccgataaagcagtccatgactgtcaaatgtcaattgttgattctcatggaacttggtttccgggcgcgtcacgtacatttagaatggcaaaagcaaggcccagcattgaacttcaaaacgaacagacattagcacaatcaggaattcatgttcacttgcagcacgtacatcagcgagtaatttcgcttcagctccgacttatggcccagctgggccagctgagcctcgtcgctattgtattcttctttgtccatatcgagtgctgtgtatcacaagcaacaagtgatggaaagaagaggacaggtaaggaggaacaagggtattattaaaccagtcccagattgcatgacctgacaacggaatttcgaatatcaaattctccaatcttgccgttctgcgctaccgttggctccccgcgggggaatacagcgagtacggagaagtgttaggtaacggatttggggttatagaacattagccagggcggcgataaccggccgtgcctgtgactggctgggcggaccgagatcggcaacttcggccagtcagagctgtgaagtcaattagctaccaaggcttttggtcaatcgcggaccgatgatccatggcttgcggcggcagccccagtgcttatgccacgatcggcgtgtcattggtcaattgccgaccccacatttattgactagcgggaagaagtctaactcggggaaatggataactgcgaaaggacatatctgatatgcaggatacatgaagatagattgttctcgaagatccggtccaacactctcgacttttactgtttctagaggcttttacggcttttgccccctgtttcagtgaaccggatcgagacgttgaggttgagctatgtggagcggtgggccgtaaaccttccaaggttatctctcgagacaaatactcctatgtaaagatatctcttgtcttcactgagtggactcctttcaccatgtggcatgctttcttatccgatcgtccatcaggacgtacccgcagaggcgaagtgtgggccgttgaccttgatcttattccaatgtgctccgagcgtatcatccagaaagaagataattatgagaatcgaaggattcatttacataaaacgaagaagagcaaatttactaactagttaactagaatttgtattgatttgtcacttccattatcccgagaatgtaccgggtacaaagtagtacgtgcattgttcaatcccaaaccacgtcttgacatcatccatggaaatccaatcctcagaatttccaacctctcattgttcaaatgacaaatcatggctggtctcaacaaacatggccaggcaaacaacccaggacccccttgacccagtgttcctccaactcccctgtccgttacagccaacagtctcaaagttaatgaggcctctctggcatcagttcttgcattcagggggatagagccacctgtggctacatattctgaccctcagcatgcagcaggaaccaacccccaatgcactcggttcgaacatgctcaaccatctcggccatggtccgcacatgaaaggcgcgacggaagatctcgaaggatcgctcatacttgtcgagagcaggatcaagttgcatcatctccatgtgggtgttggaaatggtctccatttgggggtgcgtgagcatggcagtgcaaccacggcacgcgtaaagaattttgcgcgtattgtttcgattgacgacaggcacccggcaggaaacttcatggtggaaagcatgcagattgcagtttcccaacgagatgaggaaacgcatcttgacagcgttaggggtgtccagggaaacagcgcgataaatatcatgctggtttacgaccgtgaattcgtcatcggaaccatcttcgtcgtattcgttggcttcgtcgtcgtcagaaccgaacaggccctccgcagcacgcttgatggccttgcgggagccatggatttccagggctctggtcagcgccaccttgacaggaataacccaggcaccaagatcacccaaatccatgtcatcctcatccttgcccaggcgcggcaggaacacggtttcgggaccaatcagatcgggcaggtcaaggccaaagatcattgctgcgcgctccaaggggaggcaccagtatgcatggttgttgtgcacgcatgggtggcagatacgctccatggtaggaaggtagagctggacagtcgagttgccacacatgacgcacttctcacggataattgcctctttcaggtcgtgaatgctccagatcttaaggctctggatgttcatgagaatcttcggcaggccgggggcccactgccgcaggagggaaaccgcgcttttctgcacatagtgattggcgatgcggttgacgtatgacaggctgatagcactaggcaggtcgagtttgttgatgatcatgtctacgacttcgttcgggagacgactgatcattcccaggtccgcagtagcggtccccttgggtttgatggccactggaacaggccggacctcgacatcaacgatgccagtttccaggctgcgggggctgtttccaaggattgatagcaccttggcagcctcctggtaggtggcaaaatcctttccccaggccaattgctccggttccagcgtgatggtttgcattgtagcgaaccgcgcgtgcaaatcacaaggagggcaatttgttggggaaaacgcgttgcgcgttaacggataaaagaactttatcagtgttatgtcagtggctgatgtgatgaacaaacactgtaggtatgataaacgcgaacctgatgaaaacaacaaccaacgcgcgggttgagaaggatggagtgggaagggagatgtgaagaggaaagggaaaagtaacaacaagaaggcacaagaagaaagagacacaaccccccagtttatggactgaagggaatgggaaagtacgggaactgcctggcgtaacaaacacaataccagtacctagggcactttacgatgtttgttcacatactctatttctcagttaaagctttcagtaagcttgtgctcgtagaaggcctccagcttgaccttccatacatgcactctcatctacttgaggatataaaagtgagtctactaggaagatcagtccaaataagtctaacgtcactaccaaagacaaagttacaactgactagtgcttcaatacttccggagaacaaaaggttatcctgtttcattcattgatgtctggtaggaaacttcactacatcataatagaggaaatgtctggcctgccagtccaccggggatatcaccagagctgacagctggtgggctgggatagagagtagtccatgaatgcatctatcaaagagatatcctagatctagtgtaatctacatagctaatatggttcaaaatgtctcagttctgatacctcttcgtcattagaatcaatgcaagtcgtaggacgtcacataacagtccaagtctaatgcattgatgcactaaataacattggtgaaagtagtgaatcatactatctagaaataaggtacatatattaaattctaaccatgtaataccttgagatacccatggtactgttagtaggcgcgcgggtaatgctagcttaatatcaacgggtaaccttaatttgatatccggcccaccaggaacacgcggtgtcacagggaacaacctaccaacttgaaatactatactcacaaagataacattgtgatagaaacctagggatgttgtaatggcagagaaaataattaaaatgtacagatgaacataggtatatcaaatcaggatagtaaatacaaaggccatcggccagctggcacgttaaaatatacaaacagtgccgggctttctattcaacctcctccatagggtttttcaagtgatcagtccgaacgacgtaatcatcctcgtcttcatcatctcgggcattggcaccatctgccatatcctcatcgtcaccatcaacagatccatcggattccgcaccagtgcgggactttccctttttgctaacgctctttcctttgcctttgctgctggttgttgactggccgctgccacggcggacaaggtttcctggccatttattcaggccttttatacgaccgtggatgctcccggtggtgctactggcaccatttgtggcaggctcttctggagtggctgagccgccttggtggaatgcctccattgcctctgcgattgtctgtggtgcggtatgtgcggagtcttgctttgacttgtctactgcttcgaaggtttgacggatgcgctcaaagtgttcgagttccttggcactgcgaggagttagtatcatggtatgtcatgaaaaagagacaagagaggaaagagggtgagtgatggacacatacctgacacttggcacgagctctccttgagcagaaaggaagtcctcctcggttaccgtcacattcacatcctcctttgtggcgaggtggtcaaagaaccaagcggtgctgacgggaccacctggcagagtcttaatcttctcgtcaaccgcagtggcctttcgagtgatggctttcagcatggcatccgagcagagtgcatacagatcagcaccggtataagttagaggaagctgttccgcaacgcggtcaagcgagacatcggggctgagggcgaactttcgcgtcaaggcctcgaggatagtcgcttgcttcctatgtgtatctgacacacccaggtagagcatcttgtcgaagcgaccagggcggagaagtgcagtgtcaagtagatcgggacgattagtcgcaccgatgacaaaaactccaccgctattctcctcgccgccgttcattccatccagctctgcgagcagctgactaacaatacggtccataacaccaccactgtctccctggttaccacgcttgggcgcaacagaatccagttcatcaaagaacacaacgcagggtcgagcatcccgagcgcgctggaatacccggcgcacgtttgcctcggattcaccgatgtacatgttgagcagttcggggcccttgacggagaagaagttgagagagaactcggtggcaatggccttggcaagcagggtcttgccggtgccgggcgggccatagaacaagataccactgcgcttcttcatgcccttggcgaagagttcgggccgttcaagtggcaactgaatggtctcgaccaaggcatccttaacattagtcaatccaccaacatcatcccagccaacatttggaatcttaggtgcaccgatcgaatcggcaaagttcttccgcgcagcttctacagcagcgtcaaagtctgccttgttgacacctcgtgcaccgtcgcctcctgccagcaggatgtctctaacaaagacgtccgagccggaaagctttttgctagcctcggccagactttcgaggcgagctgttctcgccccggcagctcgttccaccacatcaaccagatctcctgcgacaagagctgcggtcttcagagcaatgctgcccagttccacgtccgcagacagtctgatactgcgatctgcgacggcatttcgtaaaatgccttcacgctctttctcctccggtgcacccatctcgaactcatgggtgatgaggctgcggataccttcggggatagtttcaacatcggtggtggtggcaataacaactctcgcatcattcaagatatcactcattgccgtgacgatacgatcagcagttagaacctcgatatgtctgatcagtagtgcggtgcagtttgctccgcagtggaaagcccgttctgctcgggctttgagatatgcctcggtcttgacatcgccaccattcgcaccaccttctgtcaagatgtcgtacgcatcaatggggaatgtgtggaggccgatatccgagcacgctcgagtggcgacggttgccttgccgatgtgcctttgctgggatctgaggagaatgaagacgggcttcattcctagctgaatagcccgcgggcttgtggcagcagatatcagatcacggattcgctgctgcaatacagggataaaggactggggtggttcggcaacaatgccatgaggcgttgggacatcatggacgttctttgggattgtcttcacgcccagccaatactcccatccgttgtccagcactccgggaactcggctcacgtcactcccagcctgtaccatgcgcgtagtcgctggatcaagtacagcgactccaccccactgatcttcgcctgtctcctccagctcctctacaacagttggggctacatgcccgacacggaaccaagcgacgccaattttgcgggttccggcattatttgcattggcaccttggcctagccggatggtaatatcctcctcctgactggcactgtcaccgccagcggtgccagagaacaccgctctgccgagtccttcgtccacgctaattccgaccaaatcaccacttttaaggatacgccggcgtgactcaaagtactgtttcaaccccgcaaatagtgctggctgaaggacccgatccattgagagaggagtggaaaccttgagcaacgtgacctctttcgccaaaggcgggtttttagcagcagtgttcttcatgtgatgcaaaagaccgggtttggaggagctattaggggtaacgaaggtcatgggggaaatccgcaggtactttggattttcaatgttaccaagaagcaacgggggaacgaaaactgaaggggttaagcgggtgggtgcacgttgtgagatactggaccggcgttcacctgagtgattaatagcataccgcggcttggaggacggaagacccgaaagaccaaagatcttaactgggcgccaatcgcctgagtcttcaggggagtcgttgaaacttccaaatttgagcgaggcgaacatgttcagctgcggctcctcggcggcttcgattctgacccaatcgccagagaagcatccaatcttggcaagggtgctgatatctacaaagacaaaggagtcgacgtcttcatcgtcgcgaggccgagggtgcaacacctcatttgggactttctgcaagagtccctccaccttgaaagtcttgcctccaccacggccagggcgcagggtggccgatgtgaaattcgacgccacagacccgggggtatggattccatctaatcgtcgaccgccggctctaggagtcgccgaagtcaaggaagacatcacccccgatgatggctgtgggagttcaggtgcactaagagaaatcatgtcgtctagagaatcatccgaggagtcactcatagatcctgctgacccctccgtatctgactcctcagcagctgatgttacctccatttctgtcccactttcaccaggtttatcctcggctgcagagtagaattgttcatttgaagtgtcgtcagcttcgtcctcggccacttgcttcagaagcgcagacctggaaggcacagtttgtggagcgcggagtccttgagggcgagcctggacaagcacaatctttgtggtcggcatcaacaaaccttgcgaaacgggctcgcagaatgagatccgcgcaggcggtggtggcgcataagttatgggatgagaagggagtggcaggggtagcacgtctccgatatgtacaatgcgctgagcccccaatgcttcacggactgcagcagtgagacgctgttcggcatcccttttcgaatacttcttggcttctaccgacctccccgttttcccccaaagtccattcggccccgcattcgtaaatccaccaccaaatttactctgaacatcatcgtgattgcgcagaagatgtcgctcaacagttacaaagattgtatcgaggtgaatcggggcgacatccagaatccgaatctctacggaacgttgtgcctgcagggagttgcgtgacgagtcaactttccccagagcttggaggaaaggctggagtgaatctgctgattcaggaaacagaactgtcgattgtgacattggaactggcgctctctctgtgggctgaatgcgcacagggagtatcgtccaggtctgatcttccacggaggtataagtcggcgtatgtggggcaattgcaacataaagcactccatcgtcggaagtcgtgacatctgatcagagcaagacgagccggttaatactattatcgagaacagtgaacagggcttcacactcaccttggagggcctgctgctggaagaggtcattcgcaagctcctcggacaatatgccgaccttcccgcgcagctggggatctagcgctaaacgtgctgcgatgggtgccttgttgttcaatcgccgctttccggctcttcttctccgttgtcgaggccgctgggagctctgtccatactgttcgaagtccatgggtgcggtgtcttgtccggttgccgtcggtaaaatgaagcggggagataggagatgtggacggaaggcaatcaccaattcagctgtttaatacgcgcatatgagacgattccctacagaaccccgcgccagatttagcgaattactggggaagaagacgaggttcgccggattcagaatccgggggaaatcaacacgcgggcatctcggtaccgcccgcaattctgccatatcccgaagccgaggtccaatcggtcaagtatatgtatgtgtaggacatatatgcatgaatagaaaggatatatgtattactgttctgctacacttccattcaatcagcaatatggtcccaatggtattcgagagtgtatggcattcagtctaaccccagtcgcaagcgtgccctaacaccattggcttttatctgcttgtgatagttccccagctctggagctccaaatggctgacatcattcgggctaggatcaaattgactcccgaggtctttatcctctgaacgaagagatgagtttagaattgaggccttgtccctttttcttggcaaaatttcgtccctcggaagtacgtcaactctcgccattgccaaggcagactcattcgtagaggttttctagcaggtattggtcatgactagttatttaactaatcgttaggcagttgcatatcgagttcataatttcgcagcctggaatatttaggacggaagtcaggccggtgacgggcgaccacgccaaaggtgatgtggtgatgtaggcgagatacaattccggggggaaaatgcggttgactgattgtttccccgggcggcttgggtagactttcataccaattccatggcctagtgccattgcaaagtgaggtcagttacaacgtaagatagccatataccatgaatgcactccgtactccgtagttggcatatcaatgaactatactacaagggtggcgttgtcggtccttttagagatgccaactgtaccgttgatttcaggtgtagtagcttataaagtaaataagacgctacaaagtggctcaagaatacatcgtctctttggaaagctggtcctttttgataaactgacaggtaggctgtgcatgggcaaaaaggagtcagaaaagggcgaagttgaggggtcgatacgagcaaagagtctatttcgtccgatcagcatagcatcacaggtagagagccgtattcgtttcaatcgggcgagttttcgtccgacaaacgcaggctgagcagaccaacattggaatattattgggttactcaagacgggtacaacaagcggtgataagaggctcaagagtgcgtatgcagctcgtatttggcaagcatgactggaccagaatgagtctttggatgagctggcatatcggcctaaaagttagtcgacggtgttccctttttgttggctgtgtgacgaccctcttgattaccaattgggggccaagaccctgagcgtcatgtgccccatgccaataagcatggccatggtaattttcccagcccagactttttatggcctgatcccagtaataggtgacgtagacatggaagaaaataaaggtgctgactccaccggctttcactgtactttggatgaggacgcgtaggaagaaataaaaatgctgcctggggaggtgaggctcttttggaacggaattgtggtctttccggctgccgagtttccattttaagacagtggaaccggtggagaaacggtaccgtacccgccgggggccacgcgggagccacctcaaatggctggcctgtttaattacggttattggtttaccatacaaactttttccacggccaatcaccggccgtagaatgtgctcagccttcgcattctataccaattcggtcttagcgccttcgtctatcaggcagacatccaacacgcaatgagcctccggtcccttctcttccttgatccgcttgttccccccgtcgtctgttgttcgtgttattcttcatttcaaatcctatttggctattcatcgctgccttcagtctaaggatcctaaagatttcatatttagtggggctgaccgcttggaacccatcttggacgttatatctcaggaacattggaatcccatcagtacttcgaattcggcgaattcatttcaccctaggatatcgcaatccttgattaaaatccttttgagctggtgttcttgatacgctctgtctcaaaccccgctttgaagttttccgaccccgcgacacgttggattggagtgcatgttcttccagaggctctcatacgatcgctatcgtgatagatcttcagggccctcataccggctcaaccattcggctttaatcaaccctggttgggatccaagagaggtggtgctgttatataccaaagaacgaagatcatccgcatcaaatcgaggcttgcatctctgactcgaccgtacgtcacttcgctaatcatttggtcaactctccggtgagtcatgcgatgcgccaatcagccgcaatccactgttcctttcctgaccgagaatgtatactaaattctggccgacatagtactacgcccaataatgtcttctattcagactgagccgacgcgggtgcacccnnnnnnnnnnnnnnnnnnnnnnnnnnnnnnnnnnnnnnnnnnnnnnnnnnnnnnnnnnnnnnnnnnnnnnnnnnnnnnnnnnnnnnnnnnnnnnnnnnnnnnnnnnnnnnnnnnnnnnnnnnnnnnnnnnnnnnnnnnnnnnnnnnnnnnnnnnnnnnnnnnnnnnnnnnnnnnnnnnnnnnnnnnnnnnnnnnnnnnnntgcacccgcgtcgtcggccggtcttaaacagcgctcttcccagcgactcgcccagctctaaaatgcccctgaagaaaggagagactttccattcccctacttctcctccatccagcgatcgcgaccctgtcttgaacttccgctccctacctcatcgctcggccacctcgttagaatctatcgctgttgccgaagagcgcatgacttccatcctaggccggctgactctggaacccaccgaagaccagagctcggacgctggtgaaagtacgatagagagtgggttagtgcgcagtaactccgagtctatgtctggctccccgcgctccttaaaagaagagggccgcagcattcccatcccactagacgagaaaaagtcccgtcaacagcatagccacgagtccgacagtggactaggaacttctgtcagtagcgaagaggggctcgctgattctgaaaataaaggtgggtgtcacatgccccgggaattcattgtttccctttgttccctattgtttcctatttgagtactaacaatgaatagtgaatgatggtattcatgacaatcaatctgccatcacaagctctatttcggctttcgatgttggttcatcgccaaaacgtcaattaggacccgccgcctgcaaacagattgaacgttttgtgcttgtccctattctgaaagagccccgcttgaaaccattccacgcattggcccgaagtgtcccccagcgcattatcaataaacagattgtttgcttgcgcgacctcgagaaaaccctattgtggttggcgccggtaagtcaatacattgttctcttcaatgggtttatggagttctagttatgcttattttttttcttatacttcaaagaactccgccacttctcggaattcttacctcaacttctgcgaatttacaatccaatgcttacatacttcggcgtcgcacctcaacgatcgtgatcaacgactaccagccgatcgaccttatactaacggatacttccttgaccttgtttcgcaggtccgacgatacgcagcaatgattcgcgctgaacgcgagcgagtccaggcgactcaggactccgagactaacaaggagtccaccccttctatgtatgtgatattccattcgatttggacagcagagcctagctaattcaaaatagcatcccgaaggctactctggcaggcggtctatcccagaatgggaagtctgccgaacttgtaattacgcaagacggaaagcaaatctctctggccactggaaagccctacgaggcggatgtttctagtactaccaagcgtactatcaccctcgatgatgcaatcgatgagggcgttgagcgctctatggcgcgccgcaagaaggatgcccctcccatgaacatcaatcaaaaatgctccgactgcgacaaggtctttaagcgtccctgcgacttgacgtaagttgtcctgttgaatcgaagtgtcggaattcaattgctaacccattcataggaaacacgagaagacacacactcgcccttggaagtgcgagcactctgactgcaactaccacactaaaggttggcccaccgagaaagaacgtgatcgtcacatgaacgataggcattcggaaaagcccactctctacaagtgtcaattccacaagtgcccctatgcttccaaacgtgccagcaactgcaagcagcacatggaaaaatctcatggttgggtttacgttcgctccaagaacaacggacgcaatggcagcaagcgaggctcttctgtccaggccacacctcagactcccagtgtgtctactcctgcttcgaaggcaaccgacttcgcatcgccaatccctggtcccagtccttcacctagcgaccaggcctacaactggcctgagaatccccagttcaacttcgctgaccctcctgcgcttgcccatggggaggatttccctctattcggagaagcatcaccctatttgatgaccgacgttaactcgttcccaacatcggtgaatctgagcggcttccagagtcaattcgaagcgggtgacccgaacggcttgattccagccctggagatgcaccgccagtccatgaactccatgtctattccatctgccgaatcggttcccgacttgatgggacctgtgtcctttgacggatccccgctcaccggcacggacagcatcaacttcgacctggattggagcaatctggactatccaaccaacgaggactacactgcgatggctgcacagcttcctcaggctcatgccctcgaggccatgaagggttattcgaatgactacgaaccaatgaacctcagtcactgttcctacgatgcctctgggaagcccaccggcctctcccccggtgcgcagggcaacgccatgttatattcaccggattcttgtaacgtcggcgacactctttctgagcgctacgaatatggactccaagcccaggccggtaacgactttaccctttataacagcgctcagatggctcgcggcgctccacccatgatgcaaactcctcctagcgaccactcgcctcaataccagcaccctcaacagatgttcccctcactcgagcatgagcgcgctctgcagaacatgcagacctggaatggccagcagccccagggacactacctgcctcgggacatggagctggaatttatgaagtaaaaaggcgggattttggggtgtctttgcaaattttgttttctggagcgcatttaatgttgtcagcgatggaatgcgggttttccttattttttcatatttgattgagcttaatctttccactctaaataacatggctgaagtcctgattttttactttcatattgatggggtgtcatttacttttacgctttgaaataaatagatgaaatgaatttttctatccaactgaaagagatacatatcgtagttcctttgcctcgtgaatacttgattcatttcaatcatggccaggctgtgtagcaatatatgttcctaaacatcacgccagtacacgtagagattaggtagttaattgaatattgactcatcccaatcaaacgccctcaaaccatttatgctccaacgcctgacgcgccgtgatcctttcccccggatcaaaacgagccatggcacatacaagacttttgaagtcatcatcaacaccattccagagtacgaacgactgacgaggggtcttctggttcaatccatcccaagtgacttcgaaaacgcgaacccatggattatcaccaagatgcttcaagaatccattgagcccgtcttcatcagcgaagtaagagatctggcgctcgattacgacagcgatgggatcaacgccctcctctaactcatcttcccgaactgcaaaaatgatgcgcttatgaacggcacagatgcacttgatgaccagttaccagctgcgcttaggaaattccgaatgtgggacttacaacaagagcaaatgagaacacatctgaaggtttgttgacaggtcctcttgcgtgggcttcgggactcctccacatccagttgccggcttgtttcccgaccatatcgcatcctggggggatatgagctgcatcttccagatttccgagttgaactttgtcgacgattatcttgccattgcgatcctgccaattgatgaagacgttgtctggttttatatctacaagaataagttgtaatccagtattccagggaaatagcagtggaaatacctgtgtgaacgatatcctgatcgtgaagctcagcaagcccggtaagggcatccttaaggattttcttggttactggcaggggcgagtccttctgggcaagagttaagaggtgacctgtgaagttttcgaaaacatagacttgttgaggatagtgtctacaacaaggcggacatgacttgcattgccacgtaggcgattattgacttctcggagatcttcgaagttgatgggatgtatgtactttaatatgaatttgtgaccatccgctctaaatgtataagcatgtatgtaaatatagggaagggttggtgtctactaacgaggcacgatacacttgacgcggtggagaaacttcctcctgcaaaacatgctcgatagtgtaagtgcgaccggataggcccgtatactgtgtagaaagcagagggttgcttgggattgtgctaattgtgcgatagaaaagacgatttggtactggggacgatgtgcgctggagagggcttaggtacgttgagcttttgtaaagacgactcgctagaagagcggccttcgtgccaacattggaggtagaatacgtgaggatatagtttaataagtgctttggataggcgatgtctcttttcacatattgtaggaaactggccgtggttgacgaatcaggggaaaagcccccttacctgtggttgaaggcaagaagccgagcttacaatccctgttgattggtggttaacgcgtcgacgcggataacatccttggtcgcatgctatttccgtattttcgccaatgatgacatttattattgctccgctccacaataacaaatagccgcaagggcctaaaagaagcctaacggaatccatgtaagcgccagtctcaacctggtaatgcccgtgtacgtggttttgaagccggtgaatcatttcttcgctcaggtaagggaggggactcttgaagtaagaggccttccttagggatcgaccacatacgacgcttttactttgacgtggaggaagccaaggcgcggcgtggtgggcctgcgaatatttacacgtgacgtcaaggccggcgtcaggtgcagccatttttggccgctggctgactatttcatcattgtatggaggatagcaggatgacatatagaatcttacaatatatagcctttcatagccttgtatagccccaatatttgaggtgtcagctaaatattaaaataaattggggtgacgacatcctgtctttcccgacacctgctccgctccccctccacattgtctttcccacatctttcccagtacaaacatcgcgggacaaagcattccattccctggcattccccgctcttcagccctgtcgacggagtagctccgcattacagccccggcctctttaggcagacacattctgtgcttcaatttgcatcacgtgaatcctgggcgtgcaatttagtctcttagggactcagcttccctctcaagtgagcaggagcattaccgctcaacatgccagacacacaatcgcctgattccgctctacctagcggtaacggagatgccggtgcaaccccgccaacagaccaggtcttgaccggcaagcaagaacactgtaagttagagcatatgatgatgatattccgatttcacggtggctgacaggtagataactggcatagacctcaagcgcgagctcatcgcccgcgaagttcgtgctgaaatcttcgaactaaattctcctaccgcactccagcgattcggcgccccattcaaatcggaattcggtgaggtcgccccggtcgattcggaactgcctattcttcggtatattttcgttcaccacgtccggaacttcccgttcctggatcaagcgcgcgagaaggagttttggcaggataagctacaagttgtgggtgctacgcttccctgaatggaaaacggactaacagttgggaatatagttcttggaatcctttgccaataaacatgtctcatcttcggaggatcgactggaggagacgaagcgccggaagttggcccgcaaatgcgagaagctcgtggagctgatgatggtttccggtgtgccgaccgcgtcgggatatgaggagcgcattcagttctcagagatggaaatcgtcgagcgtggtgctcaggattcgggtctgctggctaacatgcccgagggtaattcaattaatggttgggatgtgaacgtggccgccgtccggacaacctctgtcaagcggacaatgcgataccatcaacatgcagtaagtttgattctgaaaaatggccttttgggagcgggatgttttgctgacaattaatgttgaaggaatttattattcgagttcggcaccacgacaaaccggagattcatattgggaggagatatggagagtttgtcaagctccacaagagattgaggaccgagctgccaggaaaacaactccctcctcttcctcgtaagaacaagtcttcttccacctcgagctggtggggctctagtgcagatgatgatgcttcgtccctttcatctttctctactcaggacacgagtgcccccgaggatcggctctctgcaccaacgctttccacagggagcgtccggcgatcgctgtcccgaggatcaaggcgatcaaccaagtcaccgcgcacgtcaacgagcgacgtgtcgagggcgactgtgctgtaccgagaggagcagcgtgtgtcgctgcgcgcgttccttcgcactgcattgcagaatagtcgcattgcagaatccaaggtcatggaagaattcttgactgcgcgccccgtcgagttgaacgaggaagagttgattgatgtagagaaacggaaaagcatggatgctgtgaggatcgaggaacagaagagattctatgagattgctaggcaacgagcggcggagctggacgtgtacatggagcagttccgccgggatattgtggagagcagtaagtcgccagcttcttccggcgtaacatggtttgctgaccacaatttcagatggattaacaaggctgttcgccgagatccgggaaaagccttcaattgcagagctcagcccgcaatatcagaaattcgccgagtggctccgcattgagtaagttatctgatttcctggtgtttcgccgtcctaacattcaatagggttgctgcaacaatataccatctgttccttgccgaggataactcccctgaactgttttcacaggcgaagagaatccacggcctggttccctacacgctcatgaagaatgtgattcgcatcgccaaccctgctgcagtcatgtctggtgttctagaccttttcatggcccagcccttcggctcgcggtcacttttgcaacgcatcttttcattaaccctaaacgaaagcatcaaagatttccaaaaatcaatttcttctctggcttcgaaggttgaagatcctattcttactcagaagctcaagagcttcgcggatgccgaggaagacatcaagaatgagatccgagcagaggctgctaccgacgatgtcgacatcattgtcgctatccttcgctctgatctactgtcgcccgaactcaccccggaacagattggcaaggtgttcaacggctacgtggcttggaactatgccgtggagaacgtagacctggaaatgcaacagggcgcccaatggttcgctcatatgaagcagcttctgaagctctacacccgccagcgcgacaaggcgatgatgctaagcattgttgaggaaccagtcaccctgcagctcttccgcgatctgttcactatcttttacgagccgctcgtccgggtttacaaatctgccaacgtatacaacagcattacggactttgctctatttgccgacgatgctatcagtgtgattgaaagtgcccagcgccaggatgcctctgccgatccgaaccaaacagtgcaggcgttcatcgacctgtgtgctcgccacgaggccaacttttacaagttcatccacgaagtgcaccagcacgataacggtctcttccagtctctcatggcttggattgaggagatcctcgatttcctgcgcaatggccccgccggaggtaaaatggacatcaatgctttgttccaaggagctgtcggagttggccagatcgacaaagaccttgctctcacggaaatcaatcagcttatcaagtggcaagaagaccggaaacgctggcatctgaacaagactcgccagaagatggctgctgaaggtatatctggggaggctatcccaggagctgcagccttcaggggcagtgatttcggtcttgatgaggtgtgtttttctttgacttcaatatggatttggatttcaggctaaccagtttacaggctgatctagaggacctcactatctcggatgaagcatctgaagcctctgatgaagactctggagatgaggacatggacgatcccattgccgtagagcgccgccgccggtcaaagaaacaggaccagcttcgtcgtaccgcgggtgaacctgtcaagcccgaggttacggagattctcaagcttgctgatccgttcggtgccatgttgcggcatgtacttgctgattagacgtcgatgttagaattattttgctacattcgtgataccgccatagatatggcttctcccgtttgattcccactatttgattttgttttcatacaccgattcattgcttgcttctatttcttggttgtgctgagggtggaaggactagatagatacagcatatgatcgggccgcacaccagatgcgttatgataattgagaccataatattcacggttcgctgtcaatgtatctctgtagcacctccgcaacctggcgattgccatattccaaggccacggccaccggcgtcttcccctctgcatcactcaactgcaaatcaattccatccgcctcaaggagtattatcacaacacccaggcgaccgctcaatgcagcatggaacagcggtgtccgacccttcttgtcgcgagcattaggattagcccgtcgaggcccagccaacaaccgccgcacgatgtcctcgtggtttctttcggccgcgattcccaacggcgtagtcccatgcttgtcagcaatctccaggtcaaccctgccagaatcaagcaacagcgccacgatctcgtcgtgtccatgctgcgcagcaacaaacaagggcgtctgcttcgtccaatccgtctgcacgttagggttcgtagccttccactccagcaaaaactgcacaacctccaaccgctccgccgaggccgcaatcgcgaacgctccccggccatactgtcgttcctcggcgttagggtcgaccttctctccatagcatttcaccatgtaatgcacgatgtcaacatagcccatgacagccgcatagaaaaacacatgctgacactcctcttcgccatcgtccccctggataatcaggcgcaggtggtcggcaagcaacatgcccacgtctccatcaatctcctgcgcggcacgactgagaggcgtccatccctgcagatttcccacgcgcggatcagcccgtccgctacagagaagcagggggaccatcgcgggctggtagttgacggcaatcatgagtgcggtatcgccaatcttgtcttgctggttgacgtctgtacggctgtcgctgagcagggtctgaacaatggctatgcagcactctttgacggcccaggacagtggcgagcaaagccatttgtcatcgggggtgttcgggtttgctttgtcgtttagcaggagcagtttgagtactgcggggctgttgtaataagcggctagcaggattggggtgcagcccttgagttgctggcctgtatttatctctgtcttggattcgatgtcgaagcctgcggaaagagctttgagggctgttgaggtgttgtcggttgttgcggcccagaagagggatttggggttgggagactttgcatcgcgcttgtacaggtctgtgttgaggagactgtaggttgctgtggtggtgcgcgcgaacgcatttaggtctgatagtgatggaaggaactcagatatcgcgaggtatagttctttggggatggttgagaagggtccctctttgcttgtgcgtggtgcactcattttcgcgtttagaggggtatgcaagaaggaggatttgattgtgggagtagtaaacgcgtgagtactttaagaagcgacagcacgtgctgtcaaacttcagatgatttctttatacatactaggcaagcggcgttgaatgggttgagatcaaaccacagcctcaacaatgcatgtcaaacagtctcttctattcaacctgattatagattaccatattatcccctatatctatgttctattcatagtacatcttctattcatgcactgttaacccacctaaaggattttatagatcttctgataatgccaagacctggagtctcgataagagataagccagtttccatggcgacagcgtcatcttccctcttcaacatttgggaaaccactgtcgcaaatgtcgtaccctcagatataccaaggttctccaagaactacttcacgccagaaccgtggcctcttcagagatggcctttggtgctgtaactgcgcggatcggccagtcgctgtccgtcgtgaaactaagaggcatgggccaaacttagggaaatggtgtatgtagaatcttccgaggttctcaatgctcggaaagatatccccatgctcgataaaagtcagcgactgacatacaaaacagtttggacttgcgcacagtcgcgatgcagcttcttcctgtgggcagctgacgctgtaatccgcgaacaagcagtcgttcttgccaactctcgatccgaacccgactctttctcgatcactccatcaaagcgcacaccaggccgtatgaacaatggactgattactccacaaaccgagcgcaaatttatcgacaccccgcagcgcaacttcaagtcgcctcccaagacagccaaggccagaatgatctcggaagcgtcagacgattttggctggaatgatgactcggatgacgatgagcttatcaaggcactatcttccagccagaccgagaccttcatctcgcaacccaacttccaccccgactccccgttcaagaccccccgcaccgccgcggtgacctcacccggaaagcgcaaattgggcgaaatcacaaatgataagtcttcctacgaccggtctgcacccgcgacgcctttctcatcccgctcctcgcgcaccgagatgtttccttcgtcggcggaattatgcatgacacccacgcctagcaagtacaacgatgtactctctgcggactcgaagtttgacacctcggatcttgcaaagagtctactcgatatcctggagaaacatagtgttgttttgccaaacagagcgcacgacgaggtgctttcgctgcttaaccggcaggatttgaagacacgggggattatccgtgggcgggatatgacgcggctggcattgaagaagaaggatggcgagattaagaagctgcaagaccgtgtttctaatctggaagctcagagggaactggatcgttctcttattgaggggatgaaaccctattgatgtcacctttggaatcggattgcacatccagcgaatactgccaattggcatttgcattcctactataattccggctcagtgttggtcccatctcacgaactgttatgatatgatagcttgcgacctgattattgtgttatcttctcagcattttgtacagcagggaattatgaccgtctttcatccatatatacaattagcatgcttaatagaaaatataagctttacccggccagtgaatgatttcgtcctacatctcacatgttaggattgtatagatctagataagacgtcacgtggctgataagaataaattatcgcgccgcaatgcgcctcgagcttccagcaaggaacaataccaataggccgaaactgaatactctacctccaatgacccccacagatgaagcttccaagcaggctactccctacgagatcgccgacatgttccgaccccctgtaaatcgtgcgatgcgcacactcgaccggtcatttttccgcagaaaggtgcccctctccgtcgcccgaatttttaaagcaagcgatatctcgaacgtgcggaaggagctggtcaagagccgcgacatactgctctggccacgcattagtcctatccgcgaggcgaaggatgaagatggcaaagtgtggaaggctatgttgttgcgcgagaacctgaagttggatggtaggtttgttgcctggatccgctaggcttgatagatacatgcatggaggttctaatatgtttatagataaggctacatggtcgcctactatcaacgagcttgtaaataagggaacggtcgccttggggccttatgaattggaattggaatatgaccattggtcgtacggtatgcttgacggatgttccctcggttcagtatacatgctaaccttctcatagctgagataatctcatcgattcttcctgaggacctggaagagattcctcaaggcttcactcaagtggggcatgtctgtatgttcgtctgagtcactgctataaccaatactgacgaaacagtgcatttaaatctccgcgcccaatacctgccatataagcacatacttgccgaggttcttatggacaagaacccgaccgtccgcaccgtcatcaataagaccgaagatgtcggctcacacagccagttccgcaccttcccattcgaactgctggcaggcgagaacgaccttaatgtcatccagcacgagcaggactgcgagttccggttcgactacgcccgtgtctactggaacagccgcctggagaccgagcatcgccgtctagtcgagaagttcgagcccagcgagatggtctgcgacgtgatggccggcgttgggcccttcgccgttccagcaggccgcaagaagatctttgtatgggccaacgatctcaacccgcacggattcgaagttatgcaagatgccatccagcgtaatagggtgcaagatttcgtcaccgctttcaaccaggatggtcgggagtttatccgttcgtcgggtcggtcgttgctgagcgcggagccgcttaccgttactatccacccgaaggtgagcagggagaagcagcgcaaggttgcgcaaggcaacggggtcccgctccccgcgccgaagatatacacccgtcctaccgttgtcaatcactatgtcatgaacttgcctgctacggctattgaattcctcgatgccttccctgggctctatgctggcgaggaacacattttcgcgcctaacacggagcagaaattgcccatggtccatgtttattgtttctcgggacactcaactgacgaggtggatgatcacattgatatctgtgagaggatctctgagcggatcggatacaaggtcactattgatgactgtgtgggaggcaagggtaaccaggaagtggaactcgctattcacaatgtgaggctggttagtcctaagaagcagatgttctgtgctagcttccgtctgccgcgggaggtcgcttttcggaaggtatagagttgcatagctgcatgtgaggcgtttggacttctccacaaaaataaaactctgataccctaagaaacatctatcaagtattggtagtaataaacaagtagtaataaataagtacgagctgccttccatcggagttaaattgtattgatgaagcggtaccggggtcaccgccttgaactgccggaagttcaactgcagagatcgccaaacaagtcacctcatctttttacagcaaatacacggcgtcgacgaagtaacttcgggcaagttacttttacaaacacattcgattcgaagcactaagctgcatacccgaatttacggaatcccgcccttcaaaccacacaatgagtgtccaactacccccacccacacaccgcaagcgcgcgctgccacaaggcgagctcgaagccgcctccacgctcaagctaggcgctgaccaacacacacacactctctcgctatccgaagcacgactcgttatccacaaggtgttggagaacaagcggcgcggggggaataaatacgaagagccggagtgagtggacagacccgacgtcgtggtcggatattcaatacttacttgtgatgtctacaggaacctgaccaagaccttggattacttggacgtgtttgcgcggttcaaggatgaggagaatatcaaggccgtcgagcgacttttgaactctcacacggaactggagatgtttgagcggtcacagctgggtgagttgatttgcactgccccatcagccaagacatgacattattccatgtacttttacctggatagattgactgactcgggtctctgaacaggcagtttatgttgtgacaatgccgaggaggccaagtctctcatcccgagtctccagaacaagatctcggacagcgacttgcaagaattgctagatgaactgaccaagctgcgcaacttcaccgagtaaagcatataggggattgcattttgaggatgtttcatttttaggagcatggagttttgacggtgttctttttttttttttcagtgatcgattgcaggatgttggattaacaggccataggtactcgggaattggtgattcataatagaaacctcccggaccaaccattgccgctcctttcttattacatcttctgccaagtccgtgctcttccgttcgccacagtagcattgagcatgtgccggggaacaggatcttgactccggggtgttccactccggtacaatctattttaatgtattgtattacatatcagattgcatagcggtcagtagaaatcggaacaacacggaggagatgcatatagtgcagatacaatatagtacatatagatagttagccgagtatatatctaatgtacatacaacatgtacgtacatagtcttagcctccctccacattgcgttctccccacacagttcgggcgctactgcgactttagtatgggacggacggtgattggcccggtggaaaggcgttatcactggccgctgattggcccgggcgatccttggacagtcgaccagtcagaaagccaattgacgcaggaaaaggacgaagggagctatgttgtaacggtgatatatatcattcgccctaaaccgccctagatacagtttgaccaaattcaatctcacttccatggatgccctacgtgaaatgatgacctaacaatattctgtacgtaatgcaatgtctgcattcagaaccaatcagcaagggaccgcttatcgttgacaattaaagtgtcataattgcccgtcaatggctgctcgggcgggtttccgttacgagagcaaaaagctgatcgtctggttgtcgggaaagtaacgagtttcgggattcatccatagtttatattacctattaggtcgatatgtcattgatttccctcttttccttccttctccctcacttaccacatctcgtaacggctaggaatgacggagcgaactattcgacatctcatcctgctgcagtcacttgcaggctcatccgcctgatatatctctgatctccggtgccggctctggattatcagataacacacctgttttccctgataagcgtatgtgccgggcttatcacgacgtgatccaatgactgacgccgtatattcagaaaaaagaatcccaagagattgcggagttacacgtctggagcacaactccgtgctccgtgaagacccttatcaccttcgatctccgttcctatttgcccgtgcctcagggctagctccggtccaccgtccacatggctaccgttatcactctccagccgggatattcccaaacccattctcctgatctccgccgaaagacgggctcgaccccagtgctctctccatcccccatctccatcaactcgaccctcccccgcgcacggaatggagccagctgtgacgcctgtctccgcagaaagagcagatgtgccatgaacgaaatggtcaataaatgctactcatgcgactttcatcgccaagagtgtaccttctcccacactcacgagggtccgtcgaagaagaggaagttggacggccaggagcctgcagaaggcattaagcggtatggcattccaaccgggggatatacgcctcgatatgtagaaagaaatcgtgccctaacaatccccagaccttcaatgcagcactgtatccccgagacggagtctcacctagcagtgaacatgattcgccccgggttttttaaccaatcaacccagtatatcggcatgaccacggagctggagcccaccttgctggattatctgccactggacgaatacgacgaatgcaccgtggccaactcgcgcgtgcggagatgtgccgacgacggcaccttcatgcgcgtcgtcgacaccgtgccggactcgcatgccgtgtcactcgatgctatcgagagcatggtcgctccctacggctccacactgatcgagaagttctttgagcacgtgcacccctcgttcccgattttgatagaggaagtgttccgccaatcataccgcgagcgccgtggcctctcgccgctactcctcgccgcagtctacgtcttgacgttgaagtttgtcgacgtcggtgtcacctcgcaaactgcgcgtaagcccgatgccgcacgactagaggcttcggccttgaagctgttgatggattcgttgcaattccccagtgtatccaccatccaagccgggctcctgctgacacaaaagtcgactctcgctacggcatcgctaaacggccagctggtcacggccgcgttcgagctgggtctgcaccaggactgcacaaactggcgtatggagacctgggagaaaggcctgcggaaacgtctcgcgtgggcgttgtatatgcaggataaatggtcatcgctggtgcacggccgaccctcgcatatcttcgcgttcaactggacggtcaaggatctcgtggagcaggacttctcggacgcctttgcctccggcactgactcgtcacacgatgaaaccgccgtcggccacggccctctgcttttctgtcacatggtcgcactaaccaccatcctctccgacatcctcgaccggttctacaccctgcacgccatcgaagagttctccgccgccggaaaccagcgcacacgcatgatcctagaaaaagccaaaccagcccaaatccggctcaaagactggttctcctccctcccagcatccctcaaaatggaaacctccaccggcgaactcgtcgaaacaataacagacgaacacgcccgcaacggcgccctccacctcgcctacttcgccaccgaaataacccttcaccgctgcatcgtccgctccctcctcgccgaaggcacagaccagtacctggcacacatctgccgctccgcagccaaaacccgcctgatctccgccatggacttcgtcaaccgcctgcgccccgcccacctccgctcgttctggcccgcctcggcccgcaccaacttctccctcatcggctccttcggcatgctgctccgcatcaccgcgccgacaaacgaggaggctgacttctaccgcgtccggctgtgcgagtaccgctggacgctaggcgtcagccacaagaacgccgagttcatgggcttcgccctgcagagtctggacaacgccaccgcgctgcacaagcacgtccccgcgaagcctggtatcgccgagctgatggcgtcgtctggtaagaatgcgccgccgcgcatgcctcctaccacgcttagctcttatgatgacgctatgatggaggctgctggcacggccgcttcgagctcggttatgtcgggtctggcgtcgccggctacgtctgttagtgatatggaggatggggaaggggaagcctctatggcgcccctatgatgatgatcccgtcaacctctctcccatctcttctcctctcttctcttcatataccttactccgtcccccctcgcatcccttacctcatttccagccctttctttctttcgttgatgtcttctcacgactcccctttgctacggcgttttctccggaatttgatcttgttcttgatttcctgggatgaagcgcctgatttacctatttgaaatgattgattatgttgtgcatgtacccccatgtactcactgcttgccttgccccgcagcgacactaaaattcgttacctactttttgctatgacggaattaccctggctttggaatgaatgcatatatggtctggattggaccggattttgttatgttatgctatgcttgctttgtttcggggtttgttttcgccattgttattgttattagacagcctatgtatatagagtggatgatatgaattatgattttatttgacgatcctgttcgaggacgacaccactcaataacgctttcatttcttgctcttcacgctcgcactatttttttggttttcgtctgtggcggtgtgtggttgaacacaacgataccgtaacaggcaaaggcagaccatccgatgctgactcgatcaggttggcgtccgttacttgccaaactccccagagagagatggaccggggtttgcggatatcatcgagtgttggccagtcagactgagggatcctagtaagacgactgtcagtaatgctcgtagataaaggaaaaggaaaagaactcacattcgatacgacaagaatcgacttgtccgacgggatagttatatatggttgccattttgagtatggcgtttgtaggacactcaacacagctcctcatcattggcagcgaactacttgactagctgctggtgctagtgctagtggtcttggtcttggtcaggtattttcgggcgccttcagacgtgttggtgtgttatcggagctactgcagtgatatcattgagacaagctttcgtctccaggtgtcttatcggggttgttggtgtcaagactcaagactctgggatggtattgtcatatggcaccatcgactatggttttagtcacatcaacttcagcacatgaatatggctgctgcatattgcacggctggggcatgggtggagcaagccaccattgttcaaaatgaacagcggtcttcttgatagatatgataaccactatgtttgcttctcttagaggctctgaaccatcatctagatttcgaagaagtcattgcaggctctcggataagcccgtttcaacaacaacggtaggccattgcaagctggtactagaaggccaacgtgaagaggggctgaacagattgtagcccaattgggcagtgttgttagactgttgattgttggatttggatggtcttgagggaagactcgaggttctgactttgtcactggatagacgtcttgggtgcgatccgggcgattgacgacttcaagcgtgttgatatcttcagcttgagtttctgtgaatcatcagtaaatatatgatgatggtttaaaggaaacctgaaaggacactcaacaggacctgaagaaacatacctgaaaggattgctgaaaaggtccaacgaaaggatgatgggtgatgggtaattggtggcgcggctgcagcaccacctaaatagatatatgtagcactggttaccagtgccgcaggatgagattgattggaatcctttgtgtcatttggcagtcgggctgtttcatgattagctagagatacggtctgaaggtggcactagccatgacatacatagtagtccgcgtagattgcaaggaaaggcagaccaaatgcctagagaatgacttgggtgacccattgcccatcggtctctctaaacatcgctcgtgaagtcgaaatacgttggtcaatgcgggtgtcgatgaaaagaaaagtggaatttggggacccttctcgaatgagatactcctagaatgactcggacatgctactagttgttacactggtagcaaaggagggggagggggagggggatgacgaagaagtgtgttgaagagagtgaagagagttggtagtggtgtggtgaaataagagatgtgaaagtgaggataaagtgtggtcacgtttaccttaccttggtcttgtgtttgctaagtgctagtgtatttgctgtaattggtggtactaatagcagtcttctctcagtaataagcgacggagaaacataggctgggatgatcttgttcatttgatacgcttggtatactcccaactaaaagaaagagaactcatttccacctccaaaggcaaaatcctccaaaacactcggatccaccaaattggccagcatctccgcccgcgttcgatcaggttgtgtctgcgtgccgttgctgaagagtgaaaagaagaaatccccgtcctctggatcagtacgttggtccataatagatgatggggtgtcgagggataatccgtgcgtgggtgtaaatgatgccgctggtagaccgacctcgcctcctgttggcgttgaatttggaattagatgcttccgcgttgatgtggttgcatctgctgctgcttgtgatgaatttgagactccccctgatgatgatgtgtatggcactccgagtctagagtactggctttggttttggctgtcttcgctgtggttagctccatagacagagcgccgtcttctagccagacaagtgcgcgcaacttctagtacttcacggagcatctcggcgcagcgacgggcgacgataatatcgcccatggaggagaagatctcgagggatttttcgacgtcttcgaggagttcgtcgtctgggagacctgggtagtttgagaggatgagatggaggaggatcattgacccgtagagtgcgtaggttgtgttgtaccacctgtttcaatggtgagtttgttaattgtagtttcttaggaggaaaaggtggtggctgaccatgtgcgaatgtagatcctatgcatgaatgactcgtattgcatattgatactcatccgggcagcattgaggcaagtatgtagatgggcagaaaggtctggcgaggaaccgtctgtatttgcagttgctgccaaaaggaatggcttgtggatgaggattcgagtattgtaatatcctagacatggtacgatcaggattctttctaggatctgctaaatcggagcacggatcatgtagagggaactcactcagccttaacaccaatttctgtttgaacgcccattcagggtcattcaatgcaagtgcatctagatccaagaaagccggtagtgtcgccttccattcaagaagtcgctggtcaagtgccatagccagacgggacttatcggctattgaccgccgcatggagtggtacagttgatgagatgcttcagacatgatctgggctagggcaaccattgccgggatcatcgctatgtcattgtcttcggcatcagggtcgaagtcatcggtatcaacctggtactgtcagggttgcaccgtgcgaattgaggatggcacctacttttagcttgggaagggaggtctggtaataatgcaacgctttcatgctgtccaggcgtccagaggaacaacacatttctctaggatcgacgttagtatcatcttcgggagtacgatccacgagatagacgctcacatctcatgagagtagatacacctaaatagaagcgtcaggttttttattcatcctagctttatgttcatgcttaccaccaggtacgcctagcttctcgtctcgcactgggaggcagagaagacatgctcgaaccgagaccaatagccgctgctgtgcggacagccatcccgctatacatataacagctatggggctgcaacgaattttgacgaaacacactctaggaagacttgtcagcctccttctgatgtaaaatcgacatggacgtaccaaaagaagaagagactgggcagactccaaacaggaactttcaaaaagatcacccagagtccgttttgcgaggccgaagaagtacttcgcaaagtcaagggccgtgaaccccggtcccccccgagctcgtcgtgtttgacttggatcgacaaattgctgacagaaatgttgtagtaaggaagtctcgttcgagcttgcattgatcgcgcccagagcaacgaccgcaaagtatagcccagcaaatttcgtggtacctcggaaaagtccctggcgatttggaactgaccatgcttcattttcacatcgttgcataaaagtgcctttcgaaagtagtgggtggatgtaatgcttgttcacaaagtagctgctgatgaaggttttctcgatctccatctgcgcactctctgtaaggcggggaaataaagcttctagactgatgtcttggtctgttaatccggtcagaaattcatacgggctgtgataggcattgaaagacaaagggaaatctaccattattcactggaggggtcctgttttcgagaccatctgcatctggcggacttctctgtgctgcaaagtctgtcccatcatgggattggggcgaaggatgcccgatatagtctgcattgtaaagtaaattcacgatggagagttgtgatttgcctgacctcctgctacttttgtagctcgtttctcgcgataaaggctgagattgaggattagtataatccggtgacgccggaatttgtcgaggagtctcatcgggacgattttgatatctgagctcttgattctgtgctcttgcgtatagattacccaggaatgccaggtttgacgagttaccatagaactcggtcccattagtatgcagattgaccccacttagcccatctcttgacgcagcatcaccttgctccgaatttggcactatataggtggtcagtttagttattcgtatcggagagggcggtgcccactttgtgaagcgtcggatcgcctagccgacgggatcgttgatctgggtgggttgttgacagcataaggtcggcccctcaacaaacttggagactgggcctgcgaagaagcagtatacggcagtgacttttcggggtcgttcgtgccttttggtgtctcggtctgatatatccccggccatggagatggcctggcgctactttggctttgcccctggttagagatgctcggaaaaagatttgatgaaaatcccaacctttggtcggattctgcaatatctcgttttcttttatttgaatcgatgggggttccgcgcccaccagatgtgcggaatacgcagtcaaacgagtgatctgtcccgggtcaactactacctcggcatttcaatacgtgggactaatacatgcgcaataagaacatggttgggcttgatcacactattaattgtcagagtggacttgctttccgaaagggaagctaaaaagagactgcaatttcaatgtgagctttggcttaccttggtcttccgagcacggcaggtttcacatgcccgcgaggcccgcggcgcacgacgttgcgaggcccatcgtgctttgccttcaggcgcgtccatgcttattatagatctctgcactttgagaagcggacggtgatctcccctggcctagtctaatgagaaagaaggtgttggcccgagtggaagtggaacacccctttaccgaaccaatcgccaatcttcaacttcttcactttgcgtggggattttgcggggtctggggaaggcatttggtgttaaggtctgtttggaaaagagaatggaaaagggaaaagaaaaaaaatcatctgttatgatctcactactactgggatatacatctaggacccagccatgatccatatgagaaggacagctacttcctatcgttacagacttggaatatagtattggaatattaagtctacttaactataactagctttgacttttacttattaaagaataagtttgaatgatttgaataccaacaccaatgtcccgtatgctgttccgacggaaggcgatcttccgacggatgatatccgatatactttgctcccagcacattcttcgaaggtatagttagtatagagtatattatataaaagcttaccaggcagagagtagttaaatagctagtacatgtacgcagcggccgcagcctgactagagaccccacggaaactcttgcctaatgtgcggtgtacttctattaggtctacatataaaaggtacacccggccaatcatgaatctcttgactctcgaaaacagaataattgtacactcggaatttgaatcgtgagcatttaaagagatctcttctacaatagatgatctataaagaatgattcatatagcatgaacattttcggaggctgttgttgacccttcgttctaagaaactgattggccgtaagtactccgtgccttgatatcttatatcaagcaagagtctccggttacccaacttcctatatttaaacatacaaatcgagtgcaactggccaaatgcggacttatctccccgacggaagccgttagatagcgggtaaacatggcgagttggtatcagctgctttgagtcaatgcacctccaacttccaaggatataaaatgagcggtctcttctttttgataggacattttgtatctaatacttactaaatattataacatacttcttcaatataacgtgcctcattcctcactattgatccgatcagcattcacaaacctcaagatggccttcgatcagaacactttgcgatcgcgcttctgtcatgagctttcggaaatgtacaagagcgaagtccctctttacggcgatctgatcgatgtagtctgggaagcagacgcaaaaacagtccaaaacagccagaacatcgacggtgctcgcgttataaacccagacgatattctacccgcccggtatcgggttgaaagacacggagcaatccgactgggaacagcgcatgagctagctacaattcgtcgcatgtttgctgtgatgggcatgcatccagtgggctactatgacctcagcctcgctggattccccatgcacgctacggccttccgaccaaatacccaagaggcgctcgataagaacccatttcgcgtgttcacgacggtcttgcgaatggatcttttgacagaaagaacccggaaactagcacggaaagcgctagagcaaagagacatctttacgcccagactgcttgctctgttggatatcgcagagagccagggttttctgacaccagatcaatgcacagagctcatcagtaatggtctagagacattcaggtggcactcaaaagcaacggtcagccttgaagaatatgagcagcttaaagctgagcatcctctgattgcggatgttgtctcttttccaaactgccatattaaccacttaacgcctcggacgattgatatcgatcttgtacaacgattgatgttggatcacggcatgcctgtcaaggatcgtattgagggaccgccaaaacgatcgtgcccaatccttctgcggcagacaagcttcaaggcgctggaggaaactgtatatttcagggatccgtctggtttctatgtgaagggttcccacaccgcacgctttggtgaagtggagcagcgaggctacgctttgactcgagaaggacgccatctctatgatcgaatcttgaaccaagtcaatgcagaagctgcgaaggatgacttgaaaggagaggcctatgacaggctactagaagagcgcttcaaggagtttcccgatagtctatcggaccttcacgatctgaggctgggatatttcacctatcagttgacaccaccgggcgatcagtcggttaacgaaagcgttgtattatcggagcaacttccttcaatctcacttcaggatctactcaacaaaaagatcctgagttatgagcctatcacatacgaagacttccttcctttatccgcaggagggatcttcaattccaacttgggtggtgtctcccagtccaagcaactgataatgagcgcggatccggacctcgatggtttccagcggctccttggggcatgtgttgccgatgagttccatctatatgccgagatgcaacagaaatcgttggaaatctgtaggcagaaactgcagttgaagaagattatagtgtaggataagcgctttgtgataatgtgataatagcatctgtttcaatcttcagacaagtagttggttgctctttgatattcacgtttatagcgagcatcactaatggcatcaatacgaagtatcgctgctgcttcacttctacctcgttttcggtgttgtcagatgctttcattaggtcctccgggcctcgacgatggtatgccagtgtatggtttatgcatttgccgagaagactgcgatgagattgggcttgaatgaaactcagcgttcatgtgacggtgacgggccctacactattgcaatagagagatcttcagaaaagttcaatactatagaatacaatgcatacggaaaacagccatccatctatctgtacaatatgccgcaaatatatcaatgcatcgcggcaagacaattaccaacagcccaaagatcagaccatatctcgactagtactgtcaatacctcggaccactgtcgtgtcatggtccggcatcagattttgccccaaaagcttctcccaaacaccgaacaacccaattatgaccggggttcaattactgagctgtccgctgcgtcatccacgatcaccgcgccttccgccaacaactcatccggcgtcttcacccgcacatccatgacacgcatgagcgtatagcggtgcttgctcttggcctgcttcacgtgccgttgtctccgcttggtcttctccttgatgcgcagcggctccgcatccacacccgtcacacgaacgcggcactcgtagatacgctcgtcgatagtcggtgagcccttcattgtgaagtcgcgggatccgagtgccgaagcgcggttgaagcgcagaatatcgcctgccttgaccttaggcatgaggaagggcaaccggatgtgatcaccttctgtcaagaggtatggtcgtgcgtgcaattgagcgacgatgtagtgcggcttctggccggcaaggtggggaagctgtgacatgagagatttggtcacttcgagaggggaggtgaaagtcggggcaacgggttgttttgcgatgggaacgtgtgcgcgtgtttggggtgtcatggtttcgtcaaaagtgggagccttgacacgagtcttcggttgggtatcttgcgcccggggagtggcactgagaggtgattccgggtggctggaagccgattggctctgaggttgcgagttcatcaaagatgcactctggtgaaggcatgctcgttgctgcaggggagcagcggatgagattgtagatggtgcagtccaacgcacttcggaggccaggccccgtagagcagatcgtgaaaacatagtaattgaccgcttgtcaatactcaattatcgagagtgagagtggttcgcagtggtcgatattcgagatagaagagcggcatccccgtaactagagaaattcaacttgcgcgaatggccgctttgtcgcccgtagcatcacgtgattatctatcagtgacttgaggatgcagatttgcagcgagaagagaccaatattgtaataataaatgatataacctgatagaaagtcagttgccttaaatgttcaatcttctaccattgttcaatatttctttttcaatctgaataagtcgaagaagtcgagaaacgaccttaccgataaggagcatcacgtggttcgctatcttttcccgcatcacaactttttcggtctcgattagatcttcaaggcaagaacttcctcccccattcacctcttgttgtccattcgtcgttcatcatggtaagctccaaatgattctctgacctctcaatgttcaatttcttcatttactaactttttttctgcctatagcctcagaacgagttcgtccctccccgccagccaccgcccgatctccaactgacattttcccaggtatatcgaacgctggcagaagcagcacggcaagcgcctcgatcacgatgagcgcttgcgcaagcgccaggctcgtgagggacacaaggcgtcccacgatgcccagaacctgcgtggtctgcgggccaagctgtaccagcagagtcgccacaaggagaagatccagatgaagaagcgcatcaaggcccaggaggagaagaatgtcaagtccgccgcgcccgacgagccttccaagactcctctaccccagtacctgctcgatcgctcacaggagaccaacgccaaggccctctccagtgctatcaagaacaagcgtaatgagaaggctgctaagtttgctgttcccctacctaaggtcaagggtattagcgaggaggagatgttcaaggttatcaacaccggaaagaagacccacaagaaggcctggaagcgtatgatcaccaagcctacgttcgttggtaacgacttcacccgtcgccccgtcaaatacgagcggttcattcgtcccatgggtctgcgttacaagaagtgtaatgtcacacagtatgttttatctttggagggagagcactcaccctccggttcatcttggttggatatggtatattgactttttcttcagtcccgagctggctgtcaccgtgcaactccccatcctgtctgtcaagaagaacccccagaaccctctctatacccagctgggtgttttgacaaagggaacaatcattgaagtcaacgtctccgagttgggtctcgttaccacttccggcaaggttgtctggggtaaatgggcccagattaccaacacccctgagaacgacggctgtgttaatgcgtgagttgcttcgatcaattattctattctttatatacagctcaaactaacgtaaaatagggttctccttgtctaaattgaccacaagcacttcctccacattcccggcaggcacccgcctgtcttcgataccatgctcaggcagttctatatttccctttcttgatacatacggtctcaagactgtttcattcttgggcggtgttaatggcgcaaagtcaagtccattgatttcaaacgaaaagtattccgcatgtttggcttcttaatggacatagctagtttttagatagtcaggcatttatcaactatgattttatgaagaagcagcagctccattgtaaagatcatggatcaaagacttccaaataacccacaggataagaaacgcaatatccaagtaatgaagatagacaaagcttgtcaattaaacatcttaaccaaatgaggagttattgtcactccaaaaacgatggtactcaagcagtatccatccggatgcaggagaaagatgaaaaggctaatgaaatcatatacaggaatgaacatccacacgctgcgctgaaaccgaaattcgtcaaaatacccaccacaagacaacgtggttaggtcggacaatcaacccggaggatgatgaagaagaaagagaagaaagagacaatgcaaagaaacagacaatcagatatcccgcaaattaaccaagcagaccaagacagaaagaaattaatatatccaacaccagtcattaagtcgttctaaccaagaagggatggggaaaagccgataaggcattcaagacaaaggaaataaagtgaaggagcggctgggtgttatcatgcgttttcttcttcgagggctgctttgatttttgcaaagaagcctgcgggccatgcagctagctcctcttctctgggcacaccgcgagccttgcagtggttgacgacgttgaccaggatacgaccaagcatatcctgggtgactggaacagcaccctcaagctgggcatcggggtgcaagaagggatcgcgtgggccaagcatctcctcaatagttggtcggagagtctggtcacgctgcagacagcgcttgagagtccggacaagaccagggggtactggaatgccaccgacaccaaaggccgggaaatcgatttgtacacgggggttggggatagccatgatgcgttcataatatttggcgatcttggcgaatggtggttgtccgtagaccatcttgtacagaatacaacccaaactccaaacatcactgggttttcctaatttcataacttttccaagacttgaaggcaaaccgagggacacgttggaatcaaccaacgcctcgggggacatgtaattaggtgtgccaacttgctgttcacgatgaacgttgactgtattatcttggatcgcatttgcaattccgaagtcaataagcttcaaccggccttgaaccatgaggaaattagccggcttcaaatcggagtggacgatattgtgctcgtggacagcctggacacactcgagcatctccttccaataaaatcgggtaaagttgatatcaaaaacagcatcttcagcgtttaaacggtatgtgagaatcttttcaagatcagactctccgatctccataagcagactcagagcatgtttgtcattgttcagctcccagtcaaacaggcgcaccgcacggtccacattctccaacttcttcaacaggtcgatttcgcccttatatccactcaaagtcactggatcaacatcttcaatattgacacgcttgagagcgaagatcttgtaattctctgccatcacccggtagacacgggagctaccgcctcgaccaatacaatcgagtcgagtgaaatgcttgccattaattgagacttgactcttcttttttcgtgattgtgatgtcgatgcgcctcctgtggatgtggcagtctcaaggactgacattttcggaggaggaggagcggccctatggggggtgttgttgcttcgcgtggcaagtatctttcgtgcagagttggttgctggggtctctgctatatcgttcttctcggtatcgtaaacaacatgatacttttcgggtttatccagcatactcaacccttggggctttgtacgccggaaagttggtggtggttcattctcttggtcacgtaccgatggcaaagccggtattgaaggaaccttgaatacaggttgttccttcgcaatcgaggatttagaggacaaatctgatgaagcgggagtggactttgagccgtatgattttggcgaagatgacctcgaaaacggcccttcgacctcagcagggcggagaggatattctcgtcgattggattcacgcacaagaggcgggcttgggtcagcccatgacactttaggggatgaaggctttgctggattgcgaggtcggtattcggcattctcctcctctccttcgacatcttcccggacaccatcagctgagagatattggtgattttcctcgttactctcttcgctctgacgtcttagcacgcccctccgggctgggccattcaagaaagtgccagcaagccgaccaacccgcttgacacgtaatgagctgtgtggagcgaattcttcgccgccacggccccgcagtgcagaagaaacgccatatcgtagcgctgggtcatcttcatattgcgatttccgatcactatccgagcgctcggcactaccatagtaatcgtccgaactgcgttccgacgagcgctttcctgaaggcgagacagaggccggggatcgggtgttgctgcgcgaaacgttgatacgaacactccgttgacgtggggcgggagtgataaaatcatttgggcggctatggtgctctggttctgcgctctggctatttgataatggagagccttcgcgcgagaatcgagaactcgacgacagagcccctacacggacgactcttggggccggactaccattagatgagtcgtgtggggacgaattccggggtgagcggctttgatgtcttgatgtttcaattcgaggttcgtgtacgtgtgccttgtgtagatgaggcgaagaacctaatccatctccatgcaacaatgcttttacagaagcgctgaatttaggttctgggacctcttcgtcggagctgtccccagagtaatgtttggacatagcttgtgttgaaggagatacccgtctggaacccgagcgtgaaaccgcggatcgggacatcggtcggggtggctgtcggtacagttcattgtatgctgggagggaattcggggatgccatgccgctaatacctacattgaagttgtgaatcaatgcggccccctccaaagttctccaaagttgtcgattgtttgttgatcttggagaaagcccaggctcggggtttcttcgcgggcgcgctatatagtcacgtgcttgttgttgctatggcgacgtctgcaccacaacatgcggacattgaaataattgattctgggcttgaaaagaacattgaacacgaaagatggatataactctagccaataatagcccatttttctctggtaatgtggtccagtaccttaagtgattccaaagccttgggcagttaaagatcggccagatagcctccacttactgctatgtctattccgtagactagactgaacttgccgttgtcgtactctccggctatcaggattcagagtagcctagtatagctttggggtggttgaccataaatctatataactactccaaagaatgcaaaattgtgatatcctcttagattatatgaccttcatagtgcagcaagattgtaaggaattaattctatcactctatgactgtaaaagtactacagagtggtgagttcatacaatcatagtgatcgttcattagggcacatatatacttcaagaaagaaagataaagaatcagcttagcataccattttcttctcattttcttctcaaagaagatataagaaagaaagaaaaaatgattgcagacaagtataggccaacagattagccaagaggcgtttttccccacgtaggtaatggatgtcgatgttctgactgtgttcagactgtcggcgagttcggaggcgaaatatccatctacggcaccggcgagtgaccatgaatgcagttccaacacggtgaatacctgtcttatgtttgctcatcaaggactctcctaccctcaacttggattctagcaaaaatggcgtccagcgtagatgccaagctgatgaggcggactaagttcccccctgagttcagcaagaaggtagatatgaccaaggtcaatatcgaagttatgaagaagtgactttccccgggcttttttcggtatctccggtttactgacattgctttttctccgcccacagatggattgcaagtcaaatctccaagatattggggaacgaggatgacgtcgttatcgagctctgcttcgcgcatcttgagggggcacgctacgtaagtggtgccgtcggatatttagtgtcccaaccctagtttgctgacatgtgcttctgttctagcccgatattaaatctctccaaatccaactcaccggatttctagacaaagataccgccaagttctgtcaggagctgtggtcgctgtgcctaagcggtcaggccaatccacagggcgtcccgaaggaactcctggaagccaaaaagcttgagctcatacaagagaaggtgattgtaagcgtgctctcgaccttggatattttctaattaaattacattacagctcgaggccgagaaagccagcgaggcacttcgtcgccgacgcgaacaagaccagaatcgcgaacgagagctggacgatgtgagacgccgcgagcgaccagaccgtggacgtggaggaagaggtggcgatcgtggagatcgcggtggccgtggaggtcgaggacgcgacttcaacagacgattctcgcctcccagagaccgaaaccgcagccgcgaccgattccgtgagcctccattgcgacgcgacttggactcctacgtgccacctggtaatcggcgccgccgatcctctcgctctccccacggcacccgttctccatctggaaccccaaagccgtcgtccccatctcgccgaaaccgcgacgaaccacaccacagacgacgcgaacgcccaagcatctcagtctctcccgagcgacgccgcggaggagcgagaaggcgcagcagtccggattacggtgaccgtgttaaagcaagacccatttcccgcagccgttccccgcgctcacgttcccccagaggaaaccgccgccgaagctccgtctctcgcagccgcagtgtatctcgctcgcgatcccgccgcccgtctggacgttatgcccgccacgattcccgtcgcttaagtcgcagccgcagccgcagccgcacccctgaccgtaccggtacacgtgatcgtggtgagaaccgtcgacgccgcagccccagcggtgatcggcgccttagccgcagccgcagcaacagccccaagaaggatactgacggcaagcggccgctctctgtggaaagagacaaccctgatgacaaacgacgcaagatggctgatgagaatgaggtctcctctacccgaacccctccgaaagctgatgagccgcccaaaactgatgacagtgagacaaaagttgctgagcaggttggtcattgagaatagagattcctggtcaacctccaccttgtatcctttactacccagattcattcctatttaatgttcgtctaaacaattcacatgtcatttgtttctcaaattgctgtgttgaatgatatactaatgaaccttcaacgctcagactaagaaaccgctttctgtttggacacagtcgactgcattccgtgagaaattactccgggagagatgtattgctatgcgtcgtcaggctgcccagaagccgagcagtgcctcacagccaaagcaggactaaacgagagcacgagtgtgacttgaacgttgaaatttacgccgactaaatgagtgcgttttagcgcggtacatgtgcggagtactttaccattccaattattcttttatcatgatcgacatgctcttttatactgtaaggtggaatgttgggttgatactggggaaggtgacagtctcctaaattgtagctagtcttagccaactagttagtgtgatgagtagttcagattaagatgggaatgtaatatgaaatgaacatgatcaattacaagatatccgaagactctaaccataaccattcaaaagcacagtagattacgatgtacgatatacgtaagaaacaggatatatcaatctccaccgaagcagattagaattagaattatatatctacagagaggccagaggcggagagccggcagatcgggatgggcagccaccaccccacgtgttatcaaaaatcatcttgtcatggaaagggctcaaaaaaggcaaattaacagtattgatgaaggagaatctatatgagagccctcagagtcgtggcttcggaattatgtccaggtatattggtgtctgctttactcgcagccgcagacggtggcagtgacagtcacggtctcagtggccttgccggagccagtgttaccgccggagggaagggtggcggtaacagtgacagtctcggtgacattggaaccagtgcttccaccgctggggatggtggcagggctggtaggggcaggggccgatgcagtgacgccggaagcaccagtggtagcagcggtgccggtagcctgggcagggacggtgacggtcagagagccggtgccgctggggtgggggaccacgatggtggtggcggaaccgctaggggcagtgctggtagcctcggcagggacggtgacggtgatggtggtggagctggagccgctggagccggggatcacaacagtggtggtcgaggcactaggggcagatccagaaggaacagagccaccgacaacggtggtaccggtgggggaaacgccggtagcctcggcagggacggtgacggtgacggtggtggagctggagccgctggagccggggatcacaacggtggtggtcgaggcactaggggcagatccagaaggaacggagccaccgacaacggtggtaccggtgggggaaacgccggtagcctgggcagggatggtgacagtgagagaagaggtgccgctggggttggggaccacaatggtggtagcagaaccgctaggggcagtgccggtgactgtgacggggatggtgacagtggtggcgctggagccgctggagccggggatgacaacggtggtagcggttccggtagtggcagatccagcaggaacggaaccactgacggtagtgccggtaggggaagcgccggtggggaccacagcagggacagtaccggtggcgatggcagggatagaggcagtgagagaaccggagccgctagggttggggatcacagtcgagctgacaatttccgaggtctcggtggcacagggggtgctggtggcatcggaaccggagggaacagagacagagccggaggcggcgggaacactggcggaaacagtcagaccaacggaggcactggcaccggaaggcacggaggaggtgctggcgacgtagggggtgctggagggcaggctgaggacggaagacgaggcagtggcggcgggggcgccggggatgctgcagccggtgaaccactcgatgataatgatctggatgctgacgtcgatgttgagggaagtgcagccactgaggaaggcagcgagctcagtacgggcgctgaaggtcaggtcgaggaggctaccgccggcagcgcagagggaaagggcaccacggaggtcgacgctgagatcgtcgacgatatcggtcaggagaccagtaacatcaccgaggacaccatcaacaagattgagcgcaacggagacatcagcctcgacagcgaaggagagccaaagaaggacgacagccttgagttcaacgcccagagagcagtcggagctggcgagccagatggcgagcttggtgcggacgtcaagttccacagcggtggcgagttcgcccttggcgcatgcctcgagagcgagcttgacatcagcaccgagagcaacggcgagatcaacgcccaggaaggcggcgagggaggcctgaccgccaacggacaggaggccagactctaggacgtggatgccaacggaggcaccaacggagacggtggagagagcagtgtcagcaagagcaccaatctcaacaagttcaccaccagcacggccattgatccaggcaaggaccgaaaccttgaggtcagcgctgagctcacactcggtgctgttgagccaagcaagcagggaagccttgatgtcagccgacagactgccgacaataccaccagcggcgcagacattcagaccgaccttgatgtcgacatcaaggtcaaccttagcctcaacccaagcggagagggaagtctgagcagcaacgctcaagacaagagcagactcgaggctggcggcctcgaagataccgtcgatagtcacgtaaagctgacccttggcggcgatgttggcagatccggggatgtagacggacagagcagcgaggacgtcggcggagaggactagctcgtcatgaccgtcacaccaggcgatcagggaggtcttgagggtggtgtcaatctcggcgtggagacgcagccaaaccttgagggcggccttggcctttgcgtggatggcaccggccttgcagccgagagcaccacccgagagagcggcagcaccctgggcactcagaccagcgaagatctcaacggaggtgccttcgaggacggtactaaggataccagtcacgtcgagggtgaggtcgccgaggagctcaccgaggagatcgaggttacgggcctccacagccctatcggtagggtaggcgagagccgagctggccagaccggcgagcataacaagtgaagaacgcatgtcgagttttgtgtggtgtattaatgaatgtatagggcaaaagcgattgggagtataacttctgaacacggattatacagaagcgaaagattggacaggcaggcaatagccgccaaaaacgatagactggaaagactggaaagagtggaaagagagaaagacagttgaacaattgaagatccaaagaggtgatcgccatggttgtttatatacccctgatcaactgtgagccgggaggcttccgggtgtcgattgggagtaccgcgttaggacagcctctactggctctaccccggtctccaagtccacatttggagctatcgaccccttagacttccgggatattggaggtagaaacttggaacctttcagggccaagtggagaacgacttctaaggctaacaaccggtgcaataggtgtattaccgcatggtggacttccatccggtttatttttgggttccagagcaaaagatatcacattggcacatccacaatctggatcttaactgctccattagggttattgagatagcttgagatagaagatgcccctctgtatccgtaatccgtacaaaatccaattcggacataaagaacgaaaaaagaaaaaagaaaacatgacaagaaaagaaatctgccaagtcataaaagggaaaagatcaccacgatcaaccgacggttgaaacgttcgatcacttttttttagcgattagaacccctttctcgtctgaactatatcgtactctgacatgtctacgatgtatattgtatagagttgtagaacactacgccttacagcttccaaatccaagtatctcaatctcaggaacctaagaagtatatgcggcattccgagtggcccgactctcctatgtcccaccgcgccggggaattagtcccggcacaatatgcacgctcttgaccacatcaggcaaagatggacacgtccaattctggtcaaccaagacctgtcaattcaagatttcaagattcaaggctattcacggcgtggcgggcaatctgtcagccaccaactcaaatatggtctaatctttgtgaggtattacaagaactatatattggccgtgaatggatttagttcatggataggatatggaagcatgttatatgtgttgggacagacccaacacaaaaacaagggatagcatctaggcccttccagtcttgttgcctacactagcaagacgccaccccgtcttgaaatgttactggaatatgaagttatgcagttcatggagaatctccacttttacagccaagacaaataagaataatctattaaagatagattaatattaattaatatcgagaacatgctcaaaacgagttgacctgcagtctgcagagtggagaaagaactatctgtgaaagcgcatacggagtaaattaaccctaagtacggagtatattatagtccctcgtacttgcattctaatactcgcgccaggacattcaacatgacagcgaaacaggggctgtcaatggctcgaggaataacctagccattgaacttctcttccatgctccacacattactccgtaagtagtgtagtgatctgcaggagcccaatatgtctcaccccacgcggacaagccccacgagcgccacaaacagcctctgagcaggaaggatgaccttcccctgcgcgttggaaattgcgctcagtctgatttccaagaggccggcgagatcagatgcagcattgcaagctgcagtccagctgcagctgtccggcctatgttgcactgtcacgatcagtccatgcaggagcctatcttcgctacgaatatcgcagtgaaaatggccgagctcaaatatccaaagtacgtgttgtcatccctgagtcaatagcccccctgatcctccatgcaataatcctagttttgccaacgcaactcttaataatatcggacatacgagtggtaaagacaacatccggtctagaacaaagaaaatgattccaaaatgtaaagttccccattcggtaaggttcaactagtccgacgcctttcttcttagttgtgttagtctttcgctcggaatgattggccgagaataatatcagaactatattccatagatacgacgagctatctattggctttttttactaaagttcagtctggttgtgatagttagttattgaaatcgcagaatgtgtaaaaccgccaaactaaagacttcgatctctcatatgttgcaccgataattccccaccccctcggagagtgtcggatgttttagttaccttacgatcaaccgaaagaaaaccccagcctagtgctcagtcccgcggtccagcaagatcaacctccttgaaacagttgctatttttgttttcgacgatcgcacggctaaccgatgatccaccagttgacagcaagatctcatgaaacacctcaaagttcaaagctataaacaatttcatgccttcatgcagcatcatgcagcattatccgaaattttgccgtgggtgggttgcgctgagccgaatgcaagacatcgtgaagccgatggcccccaattcccagcttgaaacaacgcccgatctggaaagtaggcacgcttttggaaaagaagtgcattggggaataaatctctcatactaatgactcggttgcaagttccccactgtctaggacacattgctggcagggtagatgactccaactatcactaatggcaacgtcctcgcgtaggactcggaaggattgctcggttgtgctgagatggaagaagcaggaaccgatctgttcctgcagttccggcccggtcttttcatgtgattgctgtatttatattccgatgcaatattactgccgaattggaaataatgtcaaatggttgacggaatgcaccgatgaagacaagacgcaacgttgcataccatgtcggtattacggtatacactacgaagactggttgttggaaatttggtgtctttttagagaatgttcccttccaatgttgtcgaaaaatttgttgatatatatttcgaggtgacactaaccttgtgaaaaagattatattatttaaatccaaaatcccaccattgtcttctatcattgcatggcaaaggaaagagtagcatcctaatcaagaaactcaagccgagttctcgatctgacctagcctacttcggatccaagtagcaaacggtccgaagaaatgtgtaccactattacccggccgttcacaaatcgccagaagagcccggtatcgttccaacgcagatgttgaagtggcacaaataaccttcgccagatcaaccggacagagataaggcggctgccttgcgtcttcgcagatagacgcagtgccttgcattgagcacgcgtagtacacgcaatggccaataccgaagcagtgacccagttcatggctcgctgtccgacaaacgcgacctaaccagagtgcggaaagtaatgaaggcgatgaatctatctctgggagggagcggtagaatgatactgcatccttcacaggtccggtaagctccgaaaacgaatttttttgtgatcctcggctattgaccggaggtcttttctgtctcttggcagttggttctgccgaagcacatgcagacatagatttctcacaatgagatgcaggccatgcatggagacgctcgacatcttgaatagaatctagtatcggattatatcttgcactggataccacggcaacgcgacttcccccgtacgcgcggccacatacgaactcgtcatcatcgtcctcgtagagatcgaaatccacaattatcaagagggcatatgcatcttttggtaaaatgctgatggcaacatcgagaagatcgtctagattgacttggcccctatataccccatttgacaaggtacgtgagcgaacccgcacgcactcatcgccggattttagacccaggtattgcaggcctgttttcttctgaggtttcttcttaggggttttccatggaataaacttcaaggtagatggtggcatcatcttgacaggaagaccgtgatagaacgcagtcagatagtcctggacatccttcgtactagggggttttatggactcatgatctggacattttggtgtttcccatgttcccacgaagtcaacatctgcatcaatttgaggagatggaacgacatagatcgttttttgcttttcggttaccggattgcggtcttcctcatcaagccattcttgaaagctctgcgggtcttctggatctccggcaagatcatctccaggcagcaacaaaggggcaggaaaggctctgtcgtcttcttcaagtaagagtttgtcttctcgtgggaagctttgatggtctgctttgatcgcagcgaggcgttgccgttggccttgtcgtctgaaacctgctacagcagcatgcggagaggaggacaaacagacacacgtgtgatcacactttgaaattgatctttgtggcatactggaaatttcaactcaagtgtgaagaatggaagaacttggaaggggacggcatgcgattgcgcacgagcccttcccggagtagtcatcaaggactcacatgagtcacatcatcttcatgtggaattatgatagagatggttgttcttgaatcacaggtcaaaggttactcaaccctgtttgcaggccttgaataaagcgctgaactatccggcgatcagtatcccagttctgagagcagttgcttgtgtgtctcatagctcaacttcaaacataagtgcaatgccaattccactacccaggacaatacctatgagtggctggaggccgatatatcttgcgacactgaaaggaatcacccgcagatcatcattcgtggattgaatcattggagtaaagtaccatgtcgaggtgatcccaagccataacatgacccataccattccaacggctctcttccaaagcgggacaatacctgatgattgctttacctcttgccagttctctggtgcttgtacccgttgccaaatattttgcacgccatcctcgagcattatcccaaagacaaacgataagtagaatggcattgagccggatctttccatcggaacgctctgcagtatatcaaccatgacatggaacattgcggagataagaaagacaatgaaaatgttggtgtatcgctccagcattgaagatcgggtaagatgcaaaaaatctcgcgcgatgaagttactgatagaagtgaagggctgacgcatgaattgatgccagaatttcctgtgaaatacgttaacataatcatgccatcctagtaaataaatatggcttacccccaaaagttgcgcaatgtaaatgcatcggccatactcccaaaggctggtggccagtctgcaggggaatctagcccgattccaacgaaaaatatcgacagtactcgatatgcaagatcaccgattagacggtttactataaaccaaatagacagatgcgtggctattcgctctgcccattgtccgaccggcacaatccatttgacctccaaggatgcgggctcatacagaccacgttccctagcctgctgaatcgagaccgtttgcacgatgtctagcactaggcactgccatgcgacgattgctagctgtcgcagcaaaaatcgaccccatgttgggacctgcataccccgccgcagataatactttggatgagagggcacattcttcacctgccagtgtgtattgacggcacgggtttgagtaagtaagcgagatgctgcgagcaacttagacccggactttcgagtgctctttgcgtcgcgcgagatgtctgaattgactagaggattaagcaacaacaggtttgttgcctgtaaagttgcaatgacaaattgtgttatggcctggcaccatgttggactgccggacgagccaaaaggacggataaaacggctggcgatccatatcatccctggaatgcataggtagcgtaaaagagagcctttccgtgtggtgatgatgagcgcagcaggaaccacattctgaactaggtaggaacagaagaattctaatatgtttgcacctgttgagtgatatagcccgtacatcactgtctggtgtgagaggtgaatgaggtctcggtttaggctcacgattcgagccggacccacaatttatggaccagtcggttagatccgaatggattcctccaggggaagttctaaagggataaggagttggcttaccagatccaaaatttaaagccaacaggagaactttggaagctcagtgctgtattattcatacagcctagacttcacactgcaaaagtgtgctccgatgaataatctgccggcaattctattggttacctagttgtatacctatatcaagaaggcggtaaaggtctatatgcctacctagttaggacccggctgcctacaaacatctggttggtttatcagcgcctgcgcatctgtggaactttctctctacactcatctggacaacatgccttggtgtgcacaggtgtgtcagttctgtcagaagcgatatgccaacaaaaccgcgcttcgaaatcatttaaacaattacactggcacctagcgttttccggctgacggaatccatgacatcttggaaatcaatcaaactctttagcgccttcactcacactacgaggcaggtgacgatcacaaatacaaatgctggacatgttccaagataatcatatctcgctgccggttcattgagcatgttttttattggcgccactgtggatatcaacctggatcttcagaaacgaaaaatggccctcaacatctccattcatggtatcttccctttgatgaagagacggttcttcttcgcgaagagccatttccgttcctcgatcttcccctaggtacgttcacctgtttatcttttaccgctctgtccccttattcattcggcaagtaaccggttgtctcactgcgagcatgcatgttttcaaagaatttttttgactaactcgagcacattgattgactagagttgcgattgataatctacaaatttctcctctctttcgacgaaatatacattgaaaaacgtgtccgcgacagagatgttgacccccacagaagtgggacctggatgcaacataaccccatcaacaatccactggcaattatgtctgtaagtagtcaaatttatgatgaagcacgccggacgttttatagtctaaacacgttcacatttggatcgttctatggtctacctgtattcctgattggaatcggagctgaaaacgccatgctattgcggtcagtgcgctgcaagagcaaaacagatgaatacaaagactatgcggatgacattcgatcatgtctaacaaaggcagccgtggcgggacaaacgccaagccaagaactgcgaatccatcatttcgaagatctgtatttgaatcttgtaacccgaggacaacccccagttgatgtacctacttactggtccaatgattgtcgtctggtgcgacccgatattgcagacgcctgcgccttcccaggtcgaaagcgtttttccctcaacgtcattcttaggaaatatgaagtagacggacgaaatgccgatcgaaggtctacggtttcgtttgaactatatatacagaataagcgagcatgtgcttaggtattcagctgcagcggcgctgtgctttggttcctcctcatcataatgactggaagcatgggatgtgttctgtaattcagacaagcaaaagttactgatagagaatgaatgtagaatgttcatgacgtctttgagccatctttagcacgcatagcatagtattggccctggggatgatttgcgcgttgaagaataactatattgagtcttaattctgggctttacttgactagtcctatttgaatttgagattactgttggcaccactgtgaacatggaggtagtcactagcaatgtctcagaactagtcttgggaggccaaaaataccgtgaaatactgaaaaatacagacaggcgtaaaatattcagccaatgagataacagctcaggtaaggggaccctgaaaagtggaccagcatgtgattggctaatgaaagtacagtactttcagctcttcgctcttattttcctttccaaatgtcaaacatctcgagattcaatgatgcaaacagataggcctcatgtcgtgttggaatacgattgtttagatgatccccagatccccgaggatcagccgcttctcgggtccccattcacccactccgaaacccactctcaacatggattgaccatcataacttgcactgcctcggtattgtttattgccagtgcaataaacaacctcgtcgccctcaatatcacacaacactcatccgagttcggattagaccccggagttgaattatggtgagagacatctcaatgccccggcagttttctatctggttacacagaacatgccaagctcacaaccccacaggccaatgtcaatgcactatcttgctcaaggttgcacattcctgctggcaggatctttagcagacgttctaggcagtaggagaacattcctgtgcggatgctttttacagactgtttgccatatggctagcgggcttgctcgaactggcatgcagtttattactgtcagatttgtgtccggcgtggcttacccgatgtgtttcgtttctgcaatgagcattcacagggagaatcttccagttggtaagatgcgcaatttggcattctcctgtaccagtgcaagtcaatatattggctccggggtaggcatcgtccttagtggaatactctcagagactgttggttggcgatggggctttcattgcgctgcaattttgagcctatttgggtttctcctatcattttgcaggattccccaacaggccgaagagccaaaatacgtcccatgggcagacttggctgaaggtatcgattggtctggaactctgctggctagttcattgatggtacttctattctctgcattggcgtacgtattccctctcagtgatagtctatgcttacagaacgctaattaataactagcgtcatcacaaacaatgtgcaaaacattggcagatcgggcctcttcattcctcttgctcttggttggattcttgtggttgccttcctgttctggcaggattgctgggaaagagacagcacacaacacattcagaattctctttggacaaattgccattttctttccattggtttggttattttcttcgtctacgcgtcttctctctctacttcgcagcttatgatcttcgtattccaacgagtacaagggctctcggttcgacaatcttctttccaatatctggcaattccaatcgccgccgcgctgagcagtctggtcactggacgtttcttgactcgtgttacagccaaccagatactcgtcattgcaatatcactttctagtttctctccactcttgatggctacattgagcacagcttggccttgctggaaatatgcaatgcctgccctatcattaaacccggtggcaccaaattccgttatcccaattgccacaatgctggtcgctgggtcttttccctcagagactcaggagtttgcaatgggggtgctctgtactgtggcaatgatcggagcctccgtaggcatggcactgacggcgcttatctcaaacgatgtcagcacacagcagctccagaaacccgaccagagtacttctttagaatccccagagatatggatgagcggttatcggactgcattcttgttcttgctctctctaaacttggtcggcttggccgtcacttttggctgcttgcgaaaacttggattcttaggtcggaaattggatatagaccattaattcgttcatttcttcttacttatctgaggtccatgttcccattagtactacaggaataagtattctcgttaaggatgcctaatggtacgcaagctacttgtctaaattgtctaaacctaagccatttatgagacaatcgactactaccttccctattgaaccaacatgaaagaacttaggccattagtacccctttttgtcccttaaatcatccttgagtaaccatacatcggctagtattcatagaatgcgacaatgcaatcttataatagtgggaggcatgttcctataaaataaaatccatggccaccaacaaacttttcgatttcgacccgggcaaaaaagaagaacaccatgtcaccaccaaaacagagcatcctcttcctcacaagccccgagcatggacagtccaacgtagcactcgcagtagccgaagagttcctgcaccgcggcgagttcgaagtccacatcgcctccttcgaagaattatcagcacgcgtgcaagcgataaacgacaaagtggagtacgaccaagtcatccacttccatccaatcgcaggtccgtccctgtccgagatcgtgacccgtacaacaccgaatatatgtcatcggccggggcttgctggaacgcgtgatgcgtgtaacatcatcaacatctccgtggtaggctggaagcctgatgagtatatacggtcatatcgaagcagtctcgagattctgaaagatgtccgtccggtcgtcgtggttgtggatccgctgttgcatctaggactagatgccgctcgcagtatcgacacgcgaatcgtgatcctttggcctgtgcctttgaaagatatagtggtaactatccagccgaaagctggtcttttgtggaaatatcccctgtgcgcaactcatatcttcctcttagaattcgggtatcgagctgactttctgctcctcagcaccgggtcgggatatccataccctctaccatggagattgatccttgcgaatatatacatggcgttttgcttcgggcttatggttcgcttgggtaagcccctacgcgatcttctggacattcgaaagaaagcaggaattcagactgtctttcctcacgtggcaccttactgtgaaaaccatctacatctctcgccttcattccaagagatggatttcccgctatacgtcccggataatgtcatcagctgcggtccaatcctccggccatgtccgtcacttacagatagcgatccagcactggattcatggttgaaagagccgacaattctgatatgtctcgggtcacatgttcaagctccggaaaatgatgcactgcagatgacgatggctacccaggcggttttgcgcgaatttcctagtatgcaggtcttgtggaagctcaaatatgactgggaaagctctccgacggtcaagaatattctcggatctcttgtcagctctgataaggtgaggattttcccatggatccagccggagattatatctcttttggagggaggtaatatacttgcatatgtccaccatggaggagcgaactcatttttcgaggcgtgcaagtaggttatacttggggtcacacatattgaaagaaaagtgctgatgtctcttcccagggctggtgttccgcaggtcattctgccccagtggttcgacacatacgattgtccggcccgagtagagtggctaggtattggcttacacggaagccgcaatgtggcaccgggtatagacggatcgaagctgtcttcggccctgctgcgagtgttgaaagataaaggaatccagaggcgggctatagccattggagatttgtgcaagacggccgaaggacgcgtagttgctcatgatcagatcgtacagtacgcacagaaagagttgtgagcgacgtaggtgcaataaattcattgagtcattcacagttccccttccgagggctcggggcatgtatgcattatgagaatgtcattggtaaagacaagtcatcggcaattcagagagataatagccgaccgaaatccatgcaatcggtcatataaatcatgaaagaaaaaacagcaactgcgatcctcaacgcccgcgcccatatccaacaaaaataatcctagtaactgtgactagatagtcgacagctccgtcagaactcgccggacatcttgccgagcttgcctcagcccctcatcaacagttccattggcatgtcttgccttcacctcatagtgtagctcaaccagctcctttgcacgacgaagatcggccttgtcgtctgccgggctctgatctgccaatgcgctaccggacttggttgaacccgaggctgtgccatttttgtgcacatctaccagtgccagggcctcgttatgaccctgtgccgggttgttagcattgtcattgtctggtggagtactgtcccttgtttaagacgtggcttggacgcgtttgggcagccgtgaagaaggaagcaatatacttacgcagacgcggagagaattgatatctgagaggatctctgcgacttgcattttgatgtgtctagtgatgtttgagccgagagagatatttggtgtccttggaaatcagagccgaagagtgcaatgtcttggcatacccgcacttattcgaagtccgtttttcacctgggaggagattaatatcggcactcggggctcgctggatttatatatattattaatttcgtctgtctcaaagcttggcgctggatttattatcggtaggagaaataccgactctttggactccccaaatgatgacttcttatatacttctagtctctataagttaatctaagtctccttgaactcatacggtccctcgcggtccttaacctcaacctcaatccgtccctcctcgatctccttcccgtcaacctcaatcgacgccttcataacatcacccgccttgacctgtccaacacccttgggcgtaccggtaagaacaatatcacccttctccagagtcatcacgcgcgagatatgcgccaactgctgaggaatgcggtgcagcatcaggctagtcgagtcagcttggcgctcggcgttgttaacgctcagacgcaggaatgcgctgtgcgggttagggatgcgcgatttggggatctcctgcgagatagggcagaaggtatcgaagcccttggcaatggaccagggaaggcccttcttctttgcctcatcttggacgttgcgggctgtcatgtcaatagcgaggacgtagcctgtttagcgcaatggtttgattagcgacttgctgcttgagccggtccaccggtccaccgctggggtggacactgcggtatgcccgttcggacccggattgaatgctgtactcactctgaatcgcatccaatgcgccctgctcatcgttgggatcgagatcgcgcacggtcttaccgatcacaagaccgagttcgacctcatagtgtaggctgacgcccttggggcggagaacgggacccgcgccgggaacgaggatggatgatgcgggcttcaggaagaagaatggctgcttgggtgcggtgttattgagctcggcaatgtgatcgctatcaatccatgctgttagcaattgtggccgagagaagagaaagcgacgccggtgtcggaactcccgagggaacagggcgcgcggagacagggaaactcacgcatagttacggccgatgcacataaccttgcggcagttggcgcggacggaagccattttggagggaattggggttatgcgattgacgaagaagaggatttaaggaaagatatgtcgtgggagggccggaggttcgggtgttctccgaaagatgcggagaactcccacggcgccgaccgcttgtatctttatccactctctagagaaacgctgaacgaggaaaaaagattggaagatacgcatctacatatctgacactagagaactcaatgatagtcttttacggcactattcattcaattgcagctggttatccgagaattgacatatcacacaaccacgaggtcggctccctcgtccgagaatcggaatatgatccgagcatcttaatatccgtaggaagacaaatatattgatagagcaagagtcagtcaagacactggaactgctcgaaaaacctaggaataaacgtatcacacgataatagaggcctaccggctgttgaatgggctcgaattacgcttgtatgccactggcaagagtagaataatacaagctgtttatacactagttattgatacagtaagaagttaaggcttacaccaggatatctattcaataagagaatacgaagttaaatatcattcaaggacaacgccttgaggaacatgtcacattttggcccgttctattgatcaagtacgagaagaggaagcatccttaaccaacgagagcgagctagatacagacaaggaaaagcagagggaaatgcataagaaataagggaaaacggagaagcaagaggtgaacgcaaacgtgtctcatctccgttagtgcaagacataggaaccatagcaaaggccgagaaaaatgccggggcgtcgacttgtcaactcaatatgcggaagcatagccccagtcacttgcccggcacactgcaggcggaaacgcagaaagccacttttaacgcagattctgcgatcataaaccgcatcaagacgtcaagagttagggggtttagatgaggtcagccacgttcatgggcatctcctcaacctgggtggagtagaactgctcgatctcacggagcatgcggacatcgtcagcggtgacgaagttaatggcaacacccttacgaccgaaacgaccaccacgaccgatacggtgaatgtagttctcacggttggcggggagatcgtagttgatgaccagggaaacctgctggacatcgataccacgggccaacagatcggtggcgatcaggacacgggaggaaccggaacggaactccttcatgataacatcacgctggccctgctccatgtcaccgtgcatagcggagacggtgaaatcgcgggcagtgagtttgtcggtgagccagtcgacctttcggcgggtgttgcagaagatgacagcttgggtaatagtgacggtctcgtagagatcggagagggtgtcgagcttccactcctccttctcaacagcgatgtagaactgcttaataccctcaagggtaagttcctgcttcttgacaaggatacggacggggtcacgcatgaacttggtggtgacctcaaggacatcctggggcatggtagcggagagcagggtgacctgggtagactgaggaagcagctggaagatgtcgtaaatctgctcggtgaaaccacgctgaaaaaaagagttagaaccgattgatacatagagtatcaacaatagcaacttaccgacagcatctcatcggcctcgtcgaggatgaagagcttcatggcggtggtggacaggacacggcgctggatcatgtcgtggacacggccgggagtaccgacaacgacctggggaccggcgcggagagcgttcatatcctcacggacgttggtaccaccgatacaggcgtggcagtcaagggacatgaagtcaccgatggcgacaacgaccttctggatctgctgagccaactcacgggtgggagcgaggatcagagcctggcaggccttgatctcggggtcgatcttctgcaaagcggaaatggagaaggtagcggtcttaccggtaccggactgagcctgggcgataacatcgttgcctgacctcacaggttaggcgcaaatttcaaaaatgaatctggaataaaagaaactcacccttgatgatgggcatgatagcacgctgctggatggcggaagggcgctcgaaaccgtaggcgtagacacctgatatcccgtcagtatttttttttcaccccacctgataagacgaaaagggacttaccgcgaagcagctcgggcttcaggtccatagcatcgaaggaatcagtgacctcatcgtagttagactcgatctgccctattgatgaaaattgcaagattagcctccatcttcatcacgcatttcagtatccgacgccacccaatactgaatgcgatcgcgcgtgcgacagcgacagcaagcagcggggtctctaatcagaaagtaacagagacttagcacataccctcggcaagatcctcaagacccttgtcagccatgattgcggtttgatagaaaggatcacaggcgttgactgtgatcggtgtggtggggtagttttagcgaacttgtgtagattcgcgtgggaaagttgacttctagtacctcagactcttgataaagagtctttttacaggatactagggaatattgaaaaatgtggttggatgtgaaaattcacaaatggggtgggaggaggaagagaagaaaagcgaaaaaatcgaatggccacaaccgccgcgccatttgctacgccgtttttttttttacggggcaaaatctcaccgcttgccgtgttgggggtggccaagcccaagcgagtttagagtgggcgacatgggcatgaaaacatcttcttagtgatgatattgcattttttgaactgattggtgtggtgcaggttgttgctttgtttagggactttgattctgtccattcagtttcttatgttcccatttatttggtgaactatcttccagttgccatcaaacgcgtctttgaagccctaaagtgccagccagatcatgcctgatatcacctccttgtcgagtcatccaccaccacacgatgcagagatcataacggaggctatcccctcccacccattaggcgtgaagccaagcggaaatgctctgttggctacatggagtcttcgcaatgccatagggacctttcagcacctaccagacgaactaatcctgttgttgttggagactctcgatgggccaagcctattgagcatcgggcggacatgcaaggctttctatgcatttacccgggctgaagaactatggaaagcgctgtttgttcggtaagctacctgcatatccagttgaaccatgtagatcttagagccctacatttattcaatatcataatgtcccaaacttccaatgaacacatgagatactaagtctgcttgcagtgacccaagagaagatttcacctggcgagggacatggcgatcaacatatctcaatatccccgcctccaaggtgcccatggtggactgctcccagttattctccgactctctataccgaccgttcaactgcgcacatatctcactcgacccatatgtctccaagattccggcgcggaaccagatcgcacgacttccagacctgtcacctgaggaattccaagcaaagtggaccgaccgaccattcatcttgactgagcctgtcaaggcctggccagcatacaagaactggaccgtcgggtcattactcgcccgatatgggaagaccaagttccgcgccgaagccgtggactgggccatgcgtacttacggcgactacatggcagataactccgacgagagcccgctgtacctatttgatcggtccttcgtctctaagatgggactgtcggtcgggtctccagaaaccacacccgacgcatcgtactggccaccagcgtgcttcgctgaagacttcttctccgtgctcggtgacgaccgccctgatcatcaatggttgattatcggccccgagcggtccggcagcaagtttcataaagaccccaatgccaccagcgcttggaacgccgtgatacgcggtcccaagtattggattatgttcccgtccagcacgaaacagcctccgcctccgggtgtctttgtgtcggatgaccagagcgaggtgacttctccgctgagcattgccgaatggctactgggattccatgccgaggcacgccggactcagggctgcgtggaaggtatctgcggcgcgggtgagatcctacacgttccgtctggatggtggcatttggtcgtgaacctagagccatcgatcgctattacgcagaactttgttccccgaggccatctcggcgctgctttagatttcttgtctaacaagccggaccaggtgtctggattccggaagaatgtggttaatccgtgtgagcggtttatggccggtatgcgcgaggcatatcccgacctgctggagcacacttgggatgagttgcagaagaagaacgaaggcaagaagcgcaaatgggaggatattgttcacggaaaaacagaagacacccaagacaccgaaggaggtggatttagttttggatttggcgatgatgggagtgatgttgaagtcccatgaactattactgcaatatggagagtgattgaaccgcaacccaatgaagtcgccaccacaaaccagcaccattctccgccggaaagggcttccaaacccatcaattccaatccaaaaccagttcaaaatttgccatatggtcattgttctctacactgcctctgagtctgcatattcgtcaatgccccgggcatcctttaatgacacgcgattgtctttgccgctggcgttccttcggagaaagtcaagtacccaacgaatgcgcccactgcaaccgcaatcataaccggcccattatacgtcatgaagagcaacctaaaccaaatcagcaagccaggacggggccaaatggtttccgggaggcactcacatgatgaagaagctatagaacacttggatggcatacaaagccgccatgataagcttgcccttgcgcgccaatgccgctctgttctcgcttcctacaagcagtggtgagctttcgtggtgagtgtggttggttgcatccgccaggccgttggcaatgatagggtcggcgatctcagcgtctgcagagagccaagacatcaataagaagcgtgctcattcagagtataccatctccctatcatgtccccgatatccaacgaaaacatagtaggaattattgggaatagagtatccttgacactgtccatggaaagagcaaatcacttacccccagtagtggcagaagttcccaggaacgcacttagccgctgtgcatgggcagcctcgtatttacgagttgctgatcgtattccctcgtagcccgcagcaaggataacgatagcgatgagggacaagaggaaggagaagggaccggtgatacgccagctgcggaagacaatgcacaaattctcggaggaccagttaaatagcatctacatacggaattagcataaggtaaactacgaccaaagctgaatcgaggctataactcacattcatactgcatttcccgcccatgtccatatcgccgtggcccatatcgccatgacccatatcaccatggcccatgtccgagtggtccatcttcaatagtagtgagtagatatgcaatagtaacaagagacctcttatgtctcaaataagataaacgacaatatactcgtacgatggcaggtggtacgaggagcgaacaaagcacatcatcggacgattaagaggaggggaatgcaaacaagacaaacatcgataagctctccaagcggatataactctccagaacccaaacgcggtcattgactacgcactgacactacatccaccccaatctcaactttgtttcacccattctgcgcatgggatacgtcactttagcataaaatattcttcccattgcgatccacttccacaataatggccgacacagcaccggctccaacagccgcgaccgcgaccaccggagttgcagcgcccacagccggcgcaacagcaggagcaccgaatgcgcccgcagatcagaatgccgcgagtcgcgggctaccttactacgagaaactgcgccgcgagctgcgggacacgctgcagaaaaagcgcttaatggataagagcatggtgagttgcagccttgcgcgttcccgtctccagggaccgggacgtggttacctctctggaattttgttatttcgctgcgcgagcatgttttccaattgagaatctgcaatatcgccctataaatgtgtaaaccgttctgctctgatgtgtttctaacacacctttcccccaggcccaactcgaagaccaaatcttccgcttcgaacagtcatacctggaagaaacgaccgctggaaacatcatcaagggctttgacaactatatcaaaggctctgcgaatgggtcgagtctcggcgccgcgggactgggtctgggcagcagtatgggcgggtcgaggcgaaaggcgcaggtgacggaatcggatcgagttttctcgcgcagctcggcgagttacatgatggtatgctgaaccgacccgaaatggaactaccatatggtgtttctgatttgaactgaggactaacgattattgttgtgtctgcaggattccccaggtccctcctctgtacaaaccacgccttcccacgcagcaacgccgacatctacgactggaaacggcatgtccatgaagattgacccgctaaccgtttctgccgggatgaggaactcgaacggcgcatcaaaaaacaaaaagaaggcgactggtgggtcgaagaatatgaagggcaagaaccagaccgaggatatttccgacgaggacaagccttctgtgaagcggttgaagatcagctacggcagagactgagttttcttgcgagattcagtcttctttatgttctgcgcccgtcttgcatctatctgcttggctttttcttgagttcggagttggttggtttgtcttttcacatgactcctgggaggagtcgtgtttcgggcgtagcgggaaatgggaatgggatttatccgtcttattacacctacgatgcgatatcatgtaaatcacgaagttatacagactacagcgtttgtcggatacatcatttgtttcattgcttcaaattgaatgcgacacgagctaggtacatgcgatgagtgccttgcgatactctttgggcttggctaaagcctgccaatcaaatacgtttcttacaatcacagctgcagtcggtatgtagcgacctcaaacgccctcaactcaatcttgatcgcggaaagaccgcctgcagattcaatatcaagcccgtggttctcatcatcctcgagaatattgcacttgaaaacattcttcacgggcagtgaggtctcaatggtaccgcgagccttaccaccaagcgattcatagacacgcagaataacactctttccaggacgggtaggaacaccatcccaggaaacgtcaacatcatcctcgccgcgcttgacaacatctagaatcaaggatggcgcgcccttgatagatagagatttaaacaaagcattggaagcagatgctttagggccggctttctcaacaatgagtgggttattgaaattgaagcctgcgcggattgttcgggcatcaagggcaccggcgtggggaagaattgcgtagcgaatgtggtggcgacccatgtcggcgtgggcatctggcgccttgggggcacggagaagcgataagcgcatcaggttaccgcatgttgcgaagccgtatttagagtcgtttaggatggagactccgtagccgttttcggagaggtcggcccatttgtgacagcagacttcgaatttggccatatcccaactgcatattacttagtatcgttgtgaaggagatgggaagtcggtgcataccttgtgttataatgcgtcgggcgcctaacgatgccatactgggtctcgtaggatgcttcggtgttgacgatatcaactgggaactcaaccttcaggaacttcatcgtctcttgccattccacctcgctctccatttccacgtatgagggctcatcggatgtggatgccgacaggctgatcgtggtcttgatccagctcttctcgctgatctgtgtctcagtcatgacactcactcggtgtgggtcattttctacaatggtcgtcttacccccgggcaactcctttcgtgactcaatatggaacacctcgacatcccatgcttgccagtaaagaggcttgtcgtcgaagataacaagttggccagccttgcggtcctttgcgacgatttctctatcggcttgcacatcgtacaaggatgtgataaccccgtcatggacatcaaccctaagtttaccgttctccaggcggaagacaccagatttgatctcagtaacggtcaccgaagtggttgttttgaagtcagcccgctgaacttgcatcactccagttgtaccagcagccacagcatatctggatccattgtatgcggacactgctggaggaattgcgaccacttctgatcgggcccatggcaaggtattgagggccatgaaatttccacccgtgacatcgctagtgagtcccaaagccttgagggcattctttcgcagcttagctccaatctcaaagatttcggcatacaacttgtctgagtcatcatagcacatttcgatggagctacccggcaagcaatcatggaattggcaaaggagggttccttcccacatctcatcaatctcctttttgggataccgatatccatcattagaagccttgatggtagcgaatgtcgcgagaagctcaatctcacgcagcaaaaactcggccttgcggttattgcgcttattgttcgcttgagtggtgtatgttccacggtgcaactcaaagtaaagctcgccgtaccaggtagcaaaatcagtgccagaggcagcctttgtctccaactttgcaaagaaatcatctaccgactcgcccattttcactcggggcaatgagccgacctgatcactgagaccgcggcatcgacgcagcttttcgaggtgcccaaaagtcggaccaccacctccgtcgccttttccgaatacaagcagcgatgacttgtccgtgtctagagacttatgctgagtgacactgcgtttgacatcaccgaaatgcgcttcagctgtgtaggtctcagcaggagccatgtggcacaagacttgactaccatcaagcgcaacccactggaatgtagtgtgagggaagttattgatgttgttccagctgagcttctgggtgaagaaacggctcatcccagccaggcggcatatctgagggatctgtgtagagtacccgaacgtatctggcaaccagaaagttgtgcatcgcttaccgaagtttgcctcgaagaatcgctgtccatacaagaactgtctgaccagcgactctccacttggcatatttgtatcgtgctcgacccagctcccaccgatgggctggaagttgcccttccttacccagcgcttcacacgatcaaaaacggatgggtagtactgcttgagccatttgaattgttgagcctgagaacaagcaaaacggtgctcaggatatcgttccatcagatcacattggttagaccatgaccgtgctacctttcgcttggtctcagcccaaggccacagccagcaagtatcaatatgacaatggccaatggcataaactatcggctgcgtgtctgtgtcgtaaacatcggatgagtctactttgtcgccaaggtactttctagcaaccttccgcccctcgttgatagaatcattgcttccgttgcccgcaatgaaagtatcgatgatagaattggccacaacattggcttcatgcgactcccatgaatcccctgggaattcccgggcggcgtcaccaataatccagaaatcatagaaaagcgcccgggcagccaggtttaccgcggtgattcgcgcagtgctgagcgtgaactgtttatcgggatttggtggctggatcgaatcgccaccaggagcattgccgaacatgccattgcaagccatttcaatgtagaaggtatgctctttcccatcgcaccattgttttgggagaacaaactcggtccgttctccgcctccagtcaagccctgcagcgggtgtccgtcctctgtccagatcaggccttcgttgttggcatcccagtggaactctagatgctcccgttggagcatgtcctcgggcactgtgaggtgaatccggaaccaatgtgtggaccaactggggccaaaggaggcgcctatgcgagtgggcttgaattcctgagaggtcgcctctttgaaggtcggtcgctgcaggtccggaaccgagtaaacagagagcttgacatgatcttcgtccgagtttgtggcttcgtggtactttgagacaaggttttggccttcgtactggccgttcgacgtgaactgattcaatctatcggtatagatcttcttgatacgttggccgaccggacgttcagctaactggggtaaagctggaggagcggggcgagagggaacttccccacccatgatgacggattttgattgttataaagaagaaaaagaagtacgtatgctgtaatatgattgaacgaagacctaagttgtttataacagagagggtgagaggtgaaggaaggagattccctcgagttcccaaatgcggagacatgacggcatgcggagacggcgatccacggatgttacggtataccctcaacttttgtacctggatatagtcatggatatattaaagagtatttgatcattattcagatcatttcaacatctattacccaatatacttagcgtacttcgtaaactccccatctacctttaaccgttcccaatcttcgtctctcagacagataccaacaggcatctcaccaccggccgatcgaggcatcaagtatcccaagccctcaaagggggtaaaatgtggtcttcgcacagcttcaggcttacccaatcctagattgaagtcgagatcgtaacagctaattctcgaccacgaactaagcataacatccgaggaaacattgaccgtggaagtaagagaggccttggtcttgtcaaccgagcgactgagaactgtagcgagggcacgggtattgaaaataagatcatttttcttagaatcgagctgggaacgaagctcggcggcaacgatgcctagaggcttttcgaggagtttttggacagtatcggtgttgtatgttaaattctgcaggagacctggatagtcctggggaataccaaagcgctgtctcatgtcgacagcacgcgtaagcatcgattcagaagtcgcttccagacgagaagcccgggcgcgggcaatggatttccagataaaagcgttaacagcatcgtcagtagagataaagtccgtggaggcgggcaatgtattggtagcgagagccttgagggagccaagctgggccgcagagaattcaatataggcccatgtagattttggaggtgtaataggattcgagacgacagtttcgacgcttggcgggggtttcacaatctggcgagcaagctcagggcccggggtgtacgaatcatccagtaatggaatgacatgactccgatccatgttaccgactgcaagctcctcgcttgtgaacggctcatggtggcaagccttggacagcaatccgatgatagagtcttggccagtcatgtccatgacattatgctgagcgaccagcgtgagcatcaaaccgccctcgattaaattcgcctggacacagaagaccaatgctgactccgtcgtgatatttggcaaattgcccggtaggtccaaagttgtacaaggagcgatgactttctcgtcgagcatggtaaaagggaacttggcctggcgaagcccgtccattgtcggcgcggaggggtcatgtcttagatctttcaccacgagctggattttgtcgagaggagttattttgaagacgcccgtattaccatcccctgcgccctcgttgacaacctggccagtaagccatgggaaactttttgccaatcggtcaagtccgtttgtgagagtatcgatgatggcatcatgagaagatgcctcggggacggggtaaatgaaacatatttgtgtgtacaatttgtagaggcttggagtttggcctaatatatcgagaacgttgtccgtcattgttactagttttgtgcaacgtctcttgtttttactcttctgttcctgtcgaggggagatataaacattgccccgccaagtccccatcctttgtgagtcaacattactcactacgaatcattcagaattaatgtatttgatcagttcctaggataatatgtttaaagacatacttatgtattctctattgatctatctcaccacagaactcgcatcggggccacatataggcagacgctcgaggcatatattttccaacgccgtctccatccaatgtgcgacgagtttgaactggtcaaggtgtatttgagctcaagaagtgttcagaattatacatgccgaattctctaggacatatttctgaacccgtcaatgtcggccggttcgctgttcctgagagttcgttgatagatgatgcgtctttcgtgcccgatgccaacgttgagatacaggctgcctttgctatgagactgtgaaggttccttttataatctacagcggcaattagatgggatataatatattcagaagagatttatatatcgatatatctactgtataggttgacaccagaatgctcaaaataaatatggcaacataatctaattaagtatatattcatgcaccctcaaaataagtagacatatctacgacagtaagtcaccgattacctttagattccaccatgtgaacacacgcgcagattatcgcttccacggttatgggaagatgaagccctagaagaaccaggatcttcgtaaaaagcctcatagttgatcggttgcacaaaagggatttcgcacattttcttttgactgtccccatgctcgaaatcgaacaattctcttggaatttgggagtgggacgccgaccctgatcccgatcgctgcccaatggcattgtcagacttggaagctgatcgatctcccgagttggtgtgacccgagatggattgttcaaagaaatccgagactacaccagccatcatgcctgtctgaagctcggcgataacccgtttgagggttgggaggcatgtgcagagaatggaagagctgaggattaattgtagccagatggctggcatgagggcattccatgtttcatctagatggttggagttatatagtggtcggagggagtgtaggccggcaatggtcagggctagaactctatgtgggattagatgaggattttattgatgtttggaggttcacttacaggatccgcagcgcaaaaagggcagagatttggtggcgcttccaccgtattatctgcacttgatgtagtaaaaccactggtagtacaattattaccacgtctaataacatgtgggtccctcctagcgcgatatataaaacttcttgattcacgcatcgctcggggctggagttccacggttgtagttgcttgcactgtcttccgagcgctatgagtgctgccagagcccaggtactgatcagacctaaagcaaccctacttgcaagcgttattttctcaaagggttgcaaggataggatgaggagcgcaacagctgccttggaacatcctaagacgacaatagcgagaagttgactagcgaagaatgtcttgattatgttagagcatagcctgttagaggtttcttagccttcttaccttgctatatttttcaaacgaggcattgctcaatacatatcgatgcttgccaatgccatgcgagctggctacattcacacacacagtctgagggataaatatgatctgatgaattaattagactagacaatgattaaacgcaaagctacttacacaactgagaaatagagttgaatcgctccaggaaactctgcgcaaaacacgaatgcgagatatcaccgtcactgttgtcgcgaggatagtgataataagtaggatagtgctcacggtgataacccaagcactatgatcgttatcagtgacaggcaagagtggcagtaggagaacatttatgttggatgacatggcagtcgaaagattctgtagacataaatgaacagaatcatgttcatggcatagcagaagagacattatatgatatagaacccagccactgaccgagtaccctcatattgggttgttcattggacctcctataacaccaaagacacacaagcacgataattcaagtcttgcaactgatcagtctatctcaagttccacaaccgtgcatcttccagtcccacctccaacgccgatacccctaggcaagacaagaacaatttaccgtaagacaacgattctgtatgatccttgttcttggattcatgacctccgtgccagttttgctttttctttccccagtcttccttgggaactgtctaatgtttttgtttttcgccatcaactgccttatttactctgccgagaataaatggagcgccttgagatgctctccttggaaaggggaaatatagtcattggaaaagccgcgccagatcaagatgcaaatgtctccaatgcctatgacaccccgcgtaaaaagactggacccccggagcaggcttcgcctaaggtacgatacgatttgttaagtcaataaagtctgccagctgagacagtatacagcgtctttttaatttcacccagatattcttcttctcacttacttacttgtcgagctgggaaactcaggctttgtacggaagtcttatcccttgttgtgcttcagtactaataacaccgccacgacttaggaatctgagcacagtgctctcaaatggcggacctgaagccctagcttggggtatagtaattgtggtattcggcgcaatggctcaatcagcctcgctagccgagatggcatcgatgcaaccaattgccggggctcagtatcactggacacattacttggcaccgacaagccagaagaagttcatcacttggatgcagggtgtgtcacttatcgagtactgcctgactcaatgctaacttcatataggttgggtgacgtggtttgcgtggatctccacactcgccggtgttgccaacaccactgctacgatgattcagggcctagcaagtgtgaactaccccgagtacgaaccaaagcaatggcacataaccctcatcattattggcatgcttattgtcgaagcgttgatgaacatgtatacattttggctgattccgtggatcgagatgctggccggtattctgcacatttgccttttgatcgtgtttctggttgtattcacggctctagcacctcgtcacacgccggagtttgtctttctacacacgcaaagcgcctcgggctgggcgactttccccgcatggaatataggtctgcttactcctgtctgggggtttgttggtgcgtacacactgaatacttggagcaggtaaagactgaaagctaaccatcgcaggatttgacggcgcagtacatatgagtgaagaagtccgtcgagcaaaacaagccgttcctaggtctatcttctataccgtcgttgccaacggtatcctggcatatgcaatggttgtctgcatgctcttcacgatgggctctgtggaggaagcccagaaatcaagctttccgataatcgagatctgccggcaagcaacggggtcggtgaaagcagccactgcgatggtcagcgggctactcgtaatctcgctgtcggtaaatctggcgagtatcgcgtctgtctcgcgattgacgtgggcgtgggctcgtgatggggccctgccgcagtggtttagctatgtatgtatctcgcaccagacggtgccacggaagacgacgcagaatatataagctgacaagaacggcagatcgaccgcaagcacaacgtgccaattcgcgctgtttggctcccagtaatcgtcgtcatgatcctcgcgtgtttgaacatcgctgacggtgccgcttttggggcgttcgttgcactggggtcgattggcctcttcgtgtcatattttattgctattagttgcatggtgcataatcggtttcagaagcatgtggcaccgcttgggaactggaatatgggcatctggggacttccagttaatgtctttgctttggcgtatactgcctgggttacagtgtggctagcatttccgtcagcgttgccggttactggtgagaacatgaattatgcggcacccatttttggtatcactaccttgttcgcttttgtatattggtttatcaagggtcggactcgctgggagggattgaataaggaggttattcgactggctgtggaggggggagaacttcagttgaaatgattattctttgtcacttgctactggctttctactagatgtgtcagggtatatagtatagcagaacagctaaagattctattcatctaaaataatccaagcaattacttattcacaccaaaaaccaaatccatatcgatctccacaaatccttgatgaatctcattcaaacgcgcctcagcaactactctagcagttgcaagtacaacagtactaggggcatcatatggtccatagactggcatcgagatgcaccgcggagtgaggcgatggagaggcctaaggctgacctccgcgtgcccattcttgattcgacagatcatacttttcatcagcctttcgctggaatacttcctatatctctcgtcgaaatgcactgtcacgaagtagacgcattcatagtcgctcatctcatactcggggagacccggtcctccaaatttatacctaaacatacctggttgcatcatattgagggttttcggaatctgctggctgttgggttagttattaaattgctgaataaaatggctgattatgaacaggtacaggggcttatacttgtttatatagaagaatggagacagccatgatatcatattctttcatttcggacctctagtaagagacattgacctttcattcaaacactaaatagctttgttgaattatccgatacattccagatttactatgcattgttgctctttgtcttgctttgtatctaattaatccctaggattaagccacatgtgccaatctgataaggaatctcaattggcagatggggagttttgaaatactagcatcattagttagttactaggtttatctatccatttataattaagccagccaatgaggcattttgtaatctacgcatactctacaaaggtcaagaaaagtggaaagtccaaaattgttaattgaagtcgctggcgtcatccgtcgtaaatagaccgtgggcaggtgccagcatcacccacggtcatgttttgcagagcaagctcatgctaaggcaccgccttaaagagtgaaaaaaatgacaaaagtagatcacaaagtagatccaaaagctcatgggaatccgtgggaatcagtaaaggagaagtatatatccaaaagtatatcagaggctggaacttaagccttaacacaatactgatatccgagccacagatcagaacagttctcgtcgaggccagtgttaatgctgcggagttcctcgaaggagattccgtatgcatcggtcaattttgcgcagaagtcaccttccgtgatggtgtagtacttctggcatgacgaggtggcgtatgggtagataggggctgttgaggatgatgagctagtggctgctgctgaagatgtcgcggctggcgcggacttggttgtccaggatggggtggcggtggcggtctgcgtggcgacacgcacgttcactgtggaggcccaggtggcggcagattccacggaggtggtcgcggaggatgcggcggacgatgtctcggttggctgggcggcttcgacagaagtggatgtttgaataggctcggcagtcgaggtggtctgctcagcaacagtggaggaagaagtttgggtagtctccgcagcctctgtggtggaggagctgctcgagtcgtcgtcaccactgaggagcgactctgcgccgctagtgatggatgcaatggtagattcaacacactcgctcacatcgccggcccaacctcggacacggttggcgatatcagaggcgtagcagtgggttgcgccgcccgcgccgaggttgccggatgagtcgatggagccagagttgtaggtgcgcgcggccttgtagtacttggtcgcagtggcgccggactgagcctcaaagcactgcttgagaccatcgcccgaggcggttccagcggtgccgtcggtgatcatttgcttgatggtggaggcggggcagggagttgtcaagctgccgtccgtattgcaggtgccctcgcctgcgtggctttgcatgagaccggtgttcagaacgccgttgtcggtggactgcacgcgaacgcagcccttgctttcttgcataacaattgcaaggatgaatcgagcgtcgacgccagtctcgctggcgagtgacttaatgctagtgtttatgtcgcttgtttcgtcgtcagagttgtcgcatgatgcggcaatgagaatttggttgagagaccagctagaaaaacggttagctcgccattctgcttatatatttcaggttgatctactcacagagtgtcgtactccgaccattggctcagggaaggccatccgtcggagacatcgccgttaccacccatgacagcataggtagcagcggcgcgacggtgcaagttgtgatggggcttcgcgccatggggaatggcctgaatgagagtggaaaggctgccagcagccaggatctattgcgaaattagtcatggtcgcatggttggaggtggagctgtggaccatgccgcactcgaccactggttcgaagtatagacataccaatgaaggaaagaacattttgatagagggaatgagggaatgagggggagacgacgaaattgaagcgacaaagaaacagtaatgaactgtggaagaagccctgcttgcacgatcgaaagaaagaaaagaggaggggaatgaacttatatgtactcacgagatagatctgtgccctttaccctgccattctcattcggtagagtgatcagttgaggtccacagcggactcgaattacgttcgaatgtggctgtaaaagtggtccaatagcgggcgttggaccttgcgcagtcgagcaccgtacacctgtaagggctgaaacaccgtccgaaaagggacccggccgcctggttatggggcgattggtctgtttcagacagcattaagcccctgtgggcgaacttagttagccttccgaggtgatgacggcgttcattggcgttcatcaccccgttcgtgggctggtgattgggctgggatcatccatgtgggactccgatggcgaagtttgtcctttggactccttttctggccctttctgaatggctgattagtgacgagagacgttggacatttgaattctggttggttgtgtgctgtgttcctgagtttttcccctggtacctgaacggttcacccgtgtccgcgggagcttccaggggttcattgcatgtgacgagtatgcatcaagcactttatgacctgatcacatttggactggaaaatgataaggatgtgggacctgtctattcaacatcagacaaagaggcgaggtaatgtcgggttgcatcgaaatgctcaaataaccgacgaggcgctggtggctgattgtggcctgctttctcaggcattctcactcaaaaacggatttttctttctttcacataaatttcttacggggaaatcatggaggggtactccgtcgatgatctcaattgatcctattcaatccctattagggccactttattatgcattatatttctaccctagctatggtgtacaacatttcggccctattggcttcatctttttacgcttgcaatagccacgtcctgcaatttgaacacaaaaaacacagtcacaacgtacgagagatattgtcaaggctatcatccatattgcaatatagtgcagtggggtgctctcggtaaaacaaagttcttaactgttaacgcgtacttctccgcctgtctaacccacaatagaaggtcaaagaagatcatcgttattcatttctatctctttcaattttacctcgagttgatagtgtacatccaagtcatggatctatcaaacagtgatctcggtcggatcgacacatatcttcggacttccgaggctggttcatgcaattccatgcatctgatgtacaggaagcatgacagtgatagacagagcacctacggagtactccgtactccgcaaattgcaatcacctacctaaccagcaatctcgcacatgaggccagccaccaaccagcagtgatctgcgatcccttggtagcaatttcgaattgcaattacaatcgttctttttgaaatcgcctcgtattagactaacatgtcaaggatccgaatgtatggatgccttaaaaggcgctaaatcatgccagatcccccaaggccccgcaatacaaagccttcaatattgattgtgagtaatccatacttcacaccggtaactaatttatattcaaaaaatcaatatttagtcgaaatatattaacaaccgacataaacgaccacctgatcttcaaaatgaatgctgccccgctctgtcttggtttagttgtacagcatagatgccgctaagacatggcgaatccagctgacattccgacgctattggacaataattggaatatttcgatgtcaaggactagttcacccacgtggccactcgttgtacaagaagctaattctcactgctgttttatggaatgcgttttattgcgtcaatattatgtcaaaatagatatacgacaatactagttctacctagcatgttgtagtagcttccacagaggactgtggctgaggctgactgggtaaagctcgagccttatgagcatcagcccattgacactaataatactccgttgtgagtaagtcattgtgaagagagcacggagactctgtactatatatatcatagctttaaccttgttatgaggatatcagattttattgctattcttgaagtcttacgcggtgttcgagtggctcaaagtatgagacatcggattagtacaaggtgatcgaggtgaaccaccaagagttgtcgaataacatgtgcaatcatactgtaagtaattaatctctcggagaattctacagcttttgatagacagaatatccataatttggcccgcaaatcccgtcatctatagtacagagcacgcgcagccaaaatcaatataagcactcatatctcaaggggtatcttgtgattcgtacggagttcataatagtccctcatacaaattcatgatcgtcactcatcatattagctagacttcacagccatcttttttaactcaatgatcagcccgaacagcctcctattaaccagcccctgatagtcccagcccctttcccctgtctacgatctgcgatgcacggaatacaatacagagcgaaggctgacatcatacatacagagattgtacttcgtatgaggaagtacagagtacaccgtacatatatagcgattggaatccccttcgtatagtgacggattaggatttacttcagaaaggtctgttgcatcacgcagtggaatgtctagtcaatattaagtcagtcccgtacagtgatctggccaagtcattgacacctagtatacctagcacttgaagagttgtggtgaattttacgttgagtgaatagatgatatccatgggtagcaaaataaggatccaaggctcacgtgtgacgtatccaccgtggaccgcacctagaaggtttgccgatatcgcggcaaaccttcccgcaataccactgattttgaatactcgatagtagtaactcgaagattccatgttaattcaatctctacaacctgttatcgaaaacaaattgattgagagccgcggtatgttgaagaatctcagcctccgcacggcatcggagggatatttgatccgggaagttggcatcgggaccgttatttcacttcaaccctcctatggtcgcaaaactcattttttgcatcaaaatttcccgacattgagactttgttatcaactaaataaatggcaatcttggctgaaatcatgtaccagcctacgaagagataaatacaaatcttatcacagattggccttggtgagctccaactcagtccaatcccataagcgcttccccatatcctcattgcacgcccaaatgtttcgacgtttcaaaattccaacaggcacataatatcctccattagtgagctcctccttcttcgcaccaacagcagcccacagcgagttacacgcgccctgttgcactgtggaaccaaacaaacgcaaaaacttggtacccaaagcagcaaatatagaagacgaattcagagcgtcatacaaattcgttatgataatacctggatgaaccgacaccgacgttatcgacggataccgcctgctgagttccgcagcgaagagaatattggcagccttcgacgctccgtaccgggaacttgtgttgaccttcttgagcttctcttggtccaggattttctcaaatgccggcgcgaaattatgccccacggaagtgagcgacacgacgcggacgtccgagccaggctcctcggccgttttgagcagtgtcggcagcagcaatttggtgagatagaagtgcccggtatggttagtgccaagctggatttcatggcccatttccgtctcaccgggaggcagagccatcacgccagcattgaggattaggacgtcgagacgggtcgactgggcgttgacttgttccgctgcgttcttgatcgatttacttgacatcaagtccaacggtatccagctaatctcgacatcatttggaacggatgatttaaccgacttgatggcttcttctgccttgactttcgaacgcgcgccgaggaagatcttcttcggattgtgcttggccagctggaggactgtttctttgcccaaacctgcatttcctgtgaacgtgcatcgtgttagatgcggtattaatgtgccgttgatatacggtttaacccaccgcctgtgaccaagatgaccttcccggtcagatctgggatatcgctttcgggtgtgaagcttactgcacccacatagttgagtgcgtccatagcagctatcacccatccagacattttgatgaggggtaggaatactgggattaaggttgtgttcgcgttgaattggttgatagccgatgctatatatatacatataagccggagtaactatcccccgagctgacctgaaagttgacacaaaggctaagcccccaaacttcaaatggtccctgaaagtctgtcattctgaaatggccattgacttgagggttcaaggaagccacctgcaatactactagccgagaaatgcgtggtaggtctacggatagcatttgccttactcggtttgccaagccgtctctggtcttgtacggagttacatcgcatggagaccggggaactgcataattggcagcgaaagcatgaggggcggtgataaaatggtgtaaagcagcttaatgcgagatggtaagatattgagaatgatcgaggtcacaaagcgtgctgtgcacgtttagccaggcacccagaggcgtggctatagttggtggtgtgaaggccttgagatatgagggttgtggtaaagatcaggaagagtttctcgacgagtgcgcatgggatttggatatgacgagctgtggtggtagccgccccgttgtggatgatcagtgatgccagcgaggtgctcaatacaagaaataggaattgatatagaagctaagagctcgtttgagcaaggagaaagcacttaattacacaaggcgagcaaaatctggtggggtatgtataaatgacattccgagatcgaacccaatgcaccttgaagttcaaatatatagctgcttctgacaagtcaacgactgtcattgtgttgctctttctctttcacttctcttgagaccgtttctgcctcaggttgataagacctcccccctacattgttcgatcttccttcctcttccctctctctttgctagctaacaacccatggtccctttcaatcaacttcctacccttccctcttgcaagtacctatcgtcaacctttttattacgtgttggctgaaatctcatccatctacgtatatatattggccttatgggtgagtgagaaatgactcaaagttgaatgcaacatgagaggccattaggccctcctccttgccctacagagcgtgaacgtcaactctggatagggcgccaatagaccacccacgcttctggcgcttctcaacacccccttggtccatgccaaagcagtgttgatgcaagtcatgggctatcaaagcactgctgcttgcgtgatgagggaccatcttcccactgcgtcgttgtccggggccttggtctagaagcctgtggaaactgccattgggctgaccaggacaatcgctcctatcataaataggctgttgcaattcacgcatcccaacaagctcgagatgataatatcaatataccgccaatcgccctcatataatccccctggattcccgtgttggtattcccccacacgaatgttagcgagaacgagcacccacctcaccgatttacacttccgcgggtcctggctcgggatctgggacccagctagggccctataatgggccaagtgacgaaacccaactccaaacaaccatacattctccgctccgtcgagattccattacagaaagtgaagccgaaagcttatacgactaaaaatacattgatataaatcatatgagcacttaacacattcggtaagtttgagtactcacgctatgtctattacaatagaatgctaatatgaggcaaattttgacagtggaaagggcgagagcttgaagaacgtggataattccaccgacgcccctggtgacataggtcttcacttttcattaactataattgatgagaagtcaatgggtggcctagatacattgttttgggttgagcagcgatgccgtcagatcttcccaaagtctcgcgttcctttggagggttgactgtcaaaggccaccaaccttggaaactccaagactcgggtggagttcggggggcctccgctgcctcacgtgccggaagacctgacctgaccctacgatcgttacggacaacataaactcgcaacttctactctccaacaaaggtagaagggcagctaacagatggatggcgctgcgttactttttcattgagaacgcagttgcacaaggacaaatcaacattctccgcgtggacaccaagcagaacattgctgatttcaccaaggccctggcgaaagatcagttcaaatcttcgtacagctgcttggcatgacctgaataaaaggaggaattgtgtttttcatataaaatcttcaagagttgggatagggtctgtgagggggaagatggggcggatcccacatgttgtgtccgtaccgccctactgtgtaggtgtagttgcaactgttcgtcgcctcatgagcaggtgttaaacacctaccagcaattggacaaatttccgacacatatgctggcagattgtgcaaagtccacttccacccctcacaattgtgcctgccaaacctggaacctcgacctcgcgccgggtcgttccttcttaaaccgaaagcgaagtcaaggtttgcatggttttcagcgaggtcgccaggaagtgcatagaacccagtcgcggccgtagattgttttctcttttccttttccagccttgtacttagaaccccgaattgactgtacttctttcttccaaaaggaactggcactcaacacctactactcaaatagtactatggtttggtcttggctttgttttgattgctttctgttggtttttctcttgggatttgtgtctgttttgttgtgaatccggccaagaccttttttcaaccctcattactatcgaatagtccccgatatctacggctaggactccactgatccacttgttcatctatgaatggttggcatagctcccaggatgcagcaaacagtacactcattccgataatcgaaatgtcgagttcggcgaaaaatgcctattcacaatacttttcgcgaggctaagggcttccatgagctcgtcgcttttctgatgaaagtgtttgaggtgatccaactagacccacgaatgggattgacttacgtgctctctagagagcgtataagaatgccgccgctcgattagacattgtggttctagcagataattacattttgaggcagcccgctaagaattggaaggaattgttacatctgatataccttccgatttggtatatactgagttattaccctcactttctgtgggcgaaagaagaaactcctttgtagaacctcattctatcggaacggcgaccttcatctgtgccttgtgtagttgttaggctgcacttttctttcattttgcccgaagctatgcatgtgacttagattcagatgatccctaactgtgagctgatatatttatatagttctcatgacaccagggtagaacgaatgagtatggatcactttattattcaatcatgcggcgatttcattgctctatcggatcaacaccattcaaaagccgtttaatcttccagagggatatcatcgcgtcaataccgagctgctcctctggtctgaagaacagtgcagtgtgttggaactgaccgtgggattcacggagtttgttgatgtcagactctgaaagaagcactgacagatcaaacacaggaaccttcgacccagtttgcgtgagagccacggagtccaaagagctactcgattgagacccatgatcagcagccgcggaattctgtgagccaagaagcaggactgcaccacattccatacgttcaaatggctccaggcttcctagagcctccttcagcgcagcatccgagtactcgggtagatccagggccttccagaccccattggaggtgtcgacgcgcttgtatttctcgaggactgcactcagcttcttgacaacgacatctctcatactgcgcaacattaatttcggcgtatccttcgaccaaacaattcttttctcatcattcgccttcacaggcccctggggatgcttccaccggaacggcaacagtcgcataatggctggtctttttccacccttcctggagagtggcactgaaatagatcgaataagtggaaggagctcagcaatgcgaatcacgagctggcgtccagtgcgcttatctgaggattttggaattggtgatgcaattaagggacccttctcctggccttgtatcgccatcgatttggtttcttgttggtctggaatggttggctccggcgatgagctaaggttcttggtcttattgctttgcagcgagtcctgcagcagacccacagggatcatataaaggtcgtccgacgttggttgtctaataagcccccaagtccccagcagggcagatggaagtcgtgcaccagttacagagcacatacgtgccggcgaagccagcattaaggcccatgggttcttgagcaggtcggcttcctcctgtgtcgtggggcgtctcttgcgattcttctcaatcccagagcgaggatgtgtaaggagaggggactgcggaagccgttgtgaaggaggagcagtttctggagtcgaattgtctgtttccttttccaacgtagtttcgttgggttggttggtttttcgcgaggtcgcgatgccgcgattgactgcctgagcatgtgaagtcgctagcagttgtcggaacgcactcaggcgccattttgcgtatgggatgcgcgtgcccacacactccattagtttgatggctggggaatagagctgatggtgagtcgagttcagttgagggcggaaaagatgatctcggagctgttccagtagccaatcggagccccttatttgcggagaagtttttgatcgaatagtgattgcgattcgcgttacagggcgtaagaagacctaattagcttctcaaatactagggaaagcttgtctcctagaatcatccgattctagacaaagggtaatagaagtaggccgtcgttggcattgtcgctgttgtccgcctgagctccttatcttagcgccgctcttatcgcgtcacggttcaccgtccctagcctcccggctgcgcgcatttccaactcggaacaactacaaatcgcctttgcatatttttgaagatgcccccaagaatacctttgcgccagctagggcgatctgtccaaacctcacccattgctattgcccggccggccggattcgcacgatgcttctcgaaccaaggacatttgctggcgcagcccccgcggagttggacaccgacgccattcgtgacagagacagtggtatgtttgatattagccatagcaagcaggtacttggtgtgcgtatattaattacattgaacagggaggtggctggcacacgtgtatgttgcgcaattgcatccgtcgacggagcttgcatatgacccgaaacatgatcagcatactaacctgtatcgcgcaatgcagatgatatattttctcgattgatgaaggtaattagaaaccaggaggacactccttctacaacctacccatgctaatcaaacctctaggaacgcatcatctgccttaacggcgaagtcgacgacaccctctccgcttcgatagttgcgcaactccttttcctcgaagccgataacccagctaaaccaatccacctttacatcaactcaccaggaggctcagtaacagcgggtacgtggacctgccccacggctatccccgagctattctgactaacgctctcacaggcctcgcgatctacgatacaatgacatatatcgcctcccccgtgagcacaatctgcgttggtcaggctgcctcgatgggctctctccttctcgccggtggcgaagcaggcaagcgctactgtctcccgcactcctcgatcatggtgcaccagccctcgggcggctacttcggacaagcgtccgatatcgctatccacgcgaaggagatcctgcgcgtgcgcaggcagctcaatgagatctaccaacgccacttaactggcaagaagcagttgtctctcgatgagattgagaagcttatggagcgcgattactttatgggtgctaaggaggcgctcgagctgggtgttattgatgagattctggaccgtagagtccagggaaaggagggcgctggggaagagtctaagcctcctactgcgtaattgcatactcaatgtgtccatggtgctttggtatataccagaggttctaatgtttagcccataggaaggaggtgttggccaataatcaaccgaggaactcgcgctttttctacaaaaccttaggctctggttgtttggtcattacactagcgaccagcactgactaggcccaatcccatcggttggcttaaaaagctggcctgctcccttctttctccctaactgccgtcaactcccgaggtctcttccttcaaaaaagttttttttctctggttagcccagacactattattcggcaactctcgcctgacaaccatcacatctgtgtcttatgtatgtcagaatggaaccgcccggtgcaaggtctagcgatgccgccagcttatcctccatagcaagtagcgcacggcttagtgggaatggccaccaagtgccatgctcgtagtatccaaaatggcgtgttccgccaagaacaaaacgggtatagcccatgcacgctcgtatgaagatcagaagaccatctggagccaacaggattggtatcaactaccaagataatcgccgaagccaccacaagaactgcaatggcactcctcatctgaagatactcctacttattcctaagacacgctctgatcgaaaggtataagaggagagaccttgttcttttcttgggcccatactttaattgttccctctccgaaattgcggtatatacagtcacataattctatcatattgcattcgcacgctcaatgcgaccatcagtcccaacctggagaccaaagcgctgccgaaggaacgttgccgtttcgggagatggcacaaagcccgatgtcgaccgtgccgccgcatttgagtggcgccactgatcacgaattgtacccaggaagctcatgttgacaataacagcctcgccagccgcaaatgtatccatcgggtgctcaccccgaccagcacttccagattccgcgtcggccgggtcagccaagagcgtcgtgcgctcatcttcaacctcttcgtctatatggttaccatcatgagcgggggaaaccgtttcaccgccatcctcttgtcgtaaaataccacgttcttcggcgtcatgatcttgtgactgggacccctccgcatctgggcttgtatctgtgattgtatctgtgggtgtatctgcattgggcgttgcagccactggggtgggtgttccattagtcttcacccgctcgataatcaagcccagcatgatgaaatcgattaggaggattaaaaggtcgaaggaaagaagccggtaaacagatacgggagcctgcccgatgaagtcgatgaacagtcccccatgtaggtagccgcgcgtttcctcgccagcttcgggacggatcaggaaagcatgaaagagcatgcagatgaggttactgccaatgatggcgccgacgaacggttgatggcgtgtgggttcgaaggggggtgcttttggcgtgaagaagatcaattcgacaatggcacgtattgcaaataggacaatcgagcagctagacatatgttagggttcgccgcggtgagagggtgggaccattggtttggggttgatttactccatgtaatacagggcggaaagttgacaataaattaatatgtcgagatcgcgcagcaatcgatcaatgaacgcgactttggcagttgatttgactttcttcacacgcgcattttggctgctgagcgtgcctgttggcctgggaggctccgcatcgtcataggatatgccggacacgtcagcgatgtattccgcatcccgaaaggcatcaacgtctgtcatagagggtcatgagggcttggacagtatccaacaaacgaaggtataaggagtcgaggtggagactccccgtgatttggtgagctggggtacagtagttccggtgtcaccacctacactgtttgattgcttgatgccaagatacgctaagctatctctggcacagtcagctgatttgcccgataccttcatatccagcttgaagagccaaggtatgggtttatacatggtctatcttgcttagaacgtcaatttaatatcgccttctcaatgattgattcacgtgaaggccttagtttgcggtgggtctacaaaatagtcagtgtgttttggattatgtttatagctcaggttatcacgtgatatatactccaattcgaaatcgcaacttgctcttattcaacatcacattggggtttttgtttttgaagaaaaaaaccaatcatggataactctgaatccaatctgaatgtagcaaattatgtcttggaatctggacaagctgttcaaagttatgagctcatacgtcctgcaggtcagtgttgcctattttcttcgacctaaacaaacactgatatcaatgaaaggcgtcatcgagagcatgtacaaaattcatcatgatctcggcatcttttcaaacacaattgtttgtgcgacatatgagcgagcagacaatatgcccctaactccggacataatgtacaaggctcttcccctggtgatttcggaacatcctgtcttgacaacaattgtggtgactcaaccatcgacgaagaagacgggaagaaaaatgacttggcaggcacgtctgagaaagatttgtttcaaagactgcgtcagatttgtggatattgcggctgagaaagagcagtctattcgattgctgcaggaggagcatgacacctggttcaataccgaagataagacgaaaccgctgtggagagttgtggttaatggctcgaagatattattcatctttcaccactcagtctgtgatggcaggtcagggatgatattccaccgcagcttactcgctgcacttaataaagtgaccagggcgcaacatgagagtgggaaagaggaagacataccaaatgattttgatgtgccaaatcatgagctgaagcctgagtcaatggctcttcttcggcttctcggcatgaagttcagcttattcattggtctcctgagctacctctcctctcttttaatcaaggtcttcctacggaaaaattatactttcttcaacgatgtcaagttcgaagagggtttgccctccacagacaacccagtacctctcgcccagcggccagtcaccaaggttgaaaggatgtgcctcagctcgtaccaactcgcagcatcacttaaagcctgcaaggaacataaaacgtcaatgaccaccctcattctaactctgattcacgcgacccttgcatcggatgtttatccaacggcaaaaatgggcttatcgtatcttgcagttgacctgcggcgtttcctgccggccgagttttctaacactatgggcaactatgtgtccagtcatcagaccaattactggctcggcaagtaccgcagagccggagctatatccccagctaacgatacacaaattgcgctcatatggcagctaagtcaaaaggctaaagctgaccttgattctgcgatgttcacacatcgcacaccacttccagtggcgaacgctttgggattgacagctattggggaagatgatgagtctatcgcagcgggaatatacaatgttttagatgtcgctgtcacgaagaccttttgtgtgtccagcttggttgaatcagaaagccaatcatctgggccttggcagctgaaaggtacggagttctctgtggcagcgcagaaggcacgggtgggacccatgttgtattttgcaatcggaagcatgaaggatggcgagtgtgtaatcaatgttagttatgaggagggtgtgctccagagcagagttgtccggaaaatccttgagggagttgagagacggctgattatattgttgggagctgaaaatgcaaattagaaactgaacattgatgtaatgaggatttcagaacccatgaatgccaccaaaaagactcaaatcaccttgcctccttcgcttcttattcctaatgtaatttatttcgtaaacggcctgtgaattagtacattgtggcttgcttccctagtaactgcaggtactgcgccctgttccaagcacccaatagcaaaaatacctcagcgacgatctgatatctatacctagcagccgagtaagcagtcactaccaaccagcgccctttatttctcaaacccgagaacccgtgagagatccgagaaccaccaagcactacggcaatccgtcccgcaatcccgagtcactacggagtatacttgatcttcttaggctcgttatcgttatagaagtggctgtgttatattatttatatatataatttacggtataactagttatttactataactaagccttctataaatagaccaagctcttaaatgggcggtcaatttatgagcggttatatcggtagccccagggatttaccacaatatccacggggcaataatattactgaagaataatatgactgaagaaaaagctgccaatcactgagcgccaaggtcactctgttatgcatctcctaaggatctgcatatctttcgattttaggggcgcgtagtcaaacagtagcttccctctcagccacccctgtgaaatgcactaacgctggagggtctcagtggctatattaaatctgctatggcccttgattttatgaatattgacttattgtgttcaactatatatcaaaaatgaacggcacaattataaatgactgggttgacgagcctgatggacgagggacgtggggtattctatccacttgcgttctaacaattattctctgttgctggacatccgtgtccccaaatttacctgcgcaaaccgatggcgcgtttacgagatggcgatacaaattcgatctggcttgcattgcactgcttggatctgagttcctattgctgctggttctaggacagtggtcgtccgcccgccgttctattagagtaggtgataacttataagctggttcccaagcgacgagaaactgacagaacaggatttccacgacgccgggtataaaaattggacgattaagcatgccttcttcgccgatatggggggatttttaattgagcctccggggatagattgcttgccttcattccctctcaacggcaaacagctttttattttggtcaaagggggatatgttgattatccgagtataaaaaaagaggaaatcgaagataagagcaaatcagatcggcttgctaggtaagttaaaaacttacttcagtcaagccttttcttccgcttcttatactgactgtggcgggtagattgatcacaatagcccaagccctctggttttgcttgaattgcgtctttcgttttgcacagggacttcatgtcaccactatcgagcttaccacgctttcctttattctaaactttcttgtgacgtcttattgctggtatcataagcccatggatattgaaagaccagtcactttaaagcttaagagctctgtggctatcattcgcaaaaagctcgaccaaaacccagagtcaaagtggtatgaaacgccacttgacttcatctctcgtaatgagtggttttactctcggttttggagatattacattcaaatctcgcactctatgcgaatcccgctatttactcgacctacacgacgcccgtatgatcgcattccgagccatttcataccagtggtggatacccaggccgaaatcatctgtggcccagtaattcttctcttcagttctatttttttaattgcgtggaattatcacttccctacagagacagagaggctactttggcggattgctagtgtcgatgccctagcctacgcattggttggaggtcttcttgcgctatacttccacagaaccatattccaaccggacctcccatataccacagcccaagcttcattcgagcaaaaaggagaacggcatggatggattggtcgtatcgctgcgagattgagaaatattgatcctgagcaggacccaaacttggaaattcctattcgagctttggttccgatttcgtttctctgtgccatttacgctattggcagaggatttatcttaacagaagatttgattgggttgaggagtttgccggagagtgcgtttgagacagtctcgtggtcgaaatatgtacctcactggtagccatgatgcgctcaccaaatgtgcttcacttcaaacactacgatatcacgaattttcagagattactcgggcagctccacgtgccactgtcactgtcactatcacctcccccttcttcctgtctatcactatcatcttcatcactgtcgctgtcatcattaacgttgttttcgtcattttctttgccttggctcatggaagccatcaccctttcactcacaaactatccttgcgtttactctataaaggtaatgaacgatattgatgatactataagtacaaacgctatatttgaatcaatataagtaatatatatacactccgttcttctgagacttggaggcttgaaaagtctataactagaaatcgataaacacgataaggatgttgatagatttaaaaacaattttgtgactggacctcgacaacgaaaaatttgggagaaacaatgaggttcgagaattcgaatactcataatgaccagctaggtttatttgtgttcctttcagatcctttctcgcggttatctttgtctgcttgacagagaatcatccacagcaaacaaagattccaactaagagacccacttctagcgaacactctgtaatccgattgtcagatcacctatcaaacggaagtatcggctctcattggtaacaaacataacatcctagagccccgtatcatactaagctaagtctgctcgacatcatgtgttacgatcgcaacgtttgcttgtttgttatttgctttactgagcgagagttggtaatttgcattgtttacaaagcggtcaggacacagctataagaactagctgtctcccactttgcaacttgcttcttctttctcccctatcttagttattttgtattgaatgcactctgctatctctgaagacctggcacgtcacattataagggagaaaatgacagagagcgtgtatgaatggcgtgatggtctatcatacgccaaattatgctctcgcggcaccaacactgggcaaatgttccaaaatccgttgaaatcactatacttgttgagacctagctttgaggtcacagagtatcttgacagcggtgacatgaccgttgctcactgcccattgaagcggagtccggccactattatcttgggcttcgagattcgctcccagtttagcgagtgtctcgatagtaggaatatgaccgttcattgccgcgtattgaagcggagtccggccatcattatcttgggcttcgagattcgctcctagtttggcgagtgtctcgatagcgggaatatgaccgttgcttgctacgcattgaagcggagtccggccattattatcttgggcttcgagattcgctcctagtttggcgagtgtctcgatagcggtaatataacctttgatcgccgcccattgaagcggagtccagccatcattatcttgggcttcgaggttcgctcctaattcggctagtatctcgatagcgggaatatgaccgttgcttgccgcgcattgaagcggagtccggctattattatcttgggcttcgaggttcgctcctaattcggcgagtatctcgatagcgggaatatgaccgttgcttgctgcgcattgaagcggagtccggctattattatcttgggcttcgagattcgctcctagtttggcgagtatctcgatagcggtaatatgacctttgatcgctgctcgatgaagcggagtccagctatcattatcttgggtattgagattcgctcctagttcagcgagtgtctcgatagcggtaatataacctgtgatcgccgcccattgaagcggagtccagccattattatcttgggcttcgagattcgctcctaattcggctagtatctcgatagcggtaatatgacctctgttcactgctcgatgaagcagagtccagccataattatctcggacatcaagatcagcttttgccgctttgagtaaccgcacggtatttacgtggccgttgaaaactgctagtgacaaagcggtttcctggtcgcagtctttgagatcgtgtttggcattttgcttggtcaggacatgtactacatcttcatggccccgaaacgatgccatatgtaatgcagtctgcttcttaacaccagttgcgttgatatcccacttttgtaagagttcatccacgattccagtcacattattcatcgctgccagatgtagagcattcaatccatcttctcgattcaagttaggagtagagcgtgccagcagtatcctcatcagttcttcattgccacggtctgccgcgaggtgaagtggttcttcgccactggcagtctgctgttgaggattcaaccttttgacaagcagcttggctacctttgtttggccataccaaacggcatgatgtaatgcagaccaccctgatttatcactttggttcggatcccgtatcttctccaggagagcttttgtgttgttgtaatcaccttcaccggcggcctttatcaactcttctgataatttcaattggtcccatgcggtaaggtcaagtgttttcaaatcactttcccgtttcctgtattgcggattgagtaaaccatttttcatatcctcgatcatgctctgagcattttggctcctttcggtgctttgatggctgccatcgtgcgtcgtctcatcttttccaacgtgaatcttgaatagatcattcgggtcaaaatttgggatatttgacctgattaatggcggatggaaataaaccgggccgacataatcacaataacaatcgaaatgaatcttatcgcgcctaaacgaaggcttgaccagaaggcctctgcttattctagtctcactaagagtgggatcaggctcaatgagtaggatatgcttgtctttctctttttgggcgaggcgaacctttccttctatgagtggatgggcatgacctaagacaacgctttcgtctttgagaaaatcaagagaaatgatattccaatctccgaacaaattcccattctcttcaatctggaggacatcggctgaaagtgtaacaggtagatcatagatgtttgtagggcaccagttgtatccattcgtcatagttgctgaattgtggaacagatgcgcatgtgatattttgccaagcttctgcagaatctcttgataaatcttctgttgggggtagttttctggcaattcgattccaacaatgagtcctgaaatgatcgccatgtctcttggccaagatgtgtggcgtgaactgagaattgctagaagatcatccaatccgtcaacttcttccctccgaaatcttttgagtatgtctttcgcaagttcatgcttggtggtagggcaatcattgctctttgcttgtaatatgtctctgtctaggtccttcgtgatcgggccctcgggacctttgaaaatgatttgaacagtctgggacattttcaactccaatgccgtccagcctcggctgaaccaaggagacataacgatataaaagcatgctaagtctgcatcacgccattcgcgctctctaaggaaacaatcgtggaccagtgtgaccgccgcggccttgtagtttaggtgcatgcgctttaaagctttttcgcgaagctctttctttgttggaatgcagatagtatcccaccagagaccctcacagttgaattcgagagcaaattcttgaaacaactccagcaagcagctgttcacatcgccgcgggcttggcttccggtgccggtaccgtccgaccatacatgggatactgccatataccgctcgttgtgttgaagagttcccgtttcccataaataccacgctgtgatttgttgctccttgcggacagctgcttccagggtttctgaagggaaattttcaagaggacagcggcttccatcacaaggcggttcgtggcgctgtgtcaccagagtgaaattgactcgggattgctcgcaaaaatcgaaagtacacagctgatggtcttccttttttgtctcgtggggtgaattttccagcgaagggagtaatttcgggaattctccaggacctcccagtaggctcttggctatcgcccagacgcggttgcgacaaaagcccaattcgttcgtggctttgtcgactgctcgtaaggtggcctctgtatcggctaatgacaaggacatggctctaggggatttgtaaaattcgaataaatggtgtgatactggattgttcttgaaaaatagcagcgttatggaaaatttggaaaagctgacacagtgccagtgattaatattcccaaacatgggcggctatggagcagggccatatctccggagtattggcgctcgaggggtgatgcatggctatgtgcatatgggcaggagttctcgtgttcgaggtacgatggcggagtccaatcgagggtccgtgcagtctcgattcatgcttcgcccacttgactggaaatgaatcgaatacaaactgttgaggcgaagagaaaagaagaagaagaagaagaaaagcagttttgaagaaagactgagcttctcaaggaaaattatctgagagaataacagccatgctgaactctgcggaccctgtagagtaatgtgacggaaatatgcagtacgaatgtaattctctgctctctaggaaatcttggactaaataatttgaataatcaacgtgaatgtgcggaagtcgggtcatttgaggttacttttggttgagttgggtgacagctagtcacccgcgcactaacctaacacgctttgggcgtctctttcatgagtcggccactcatctcacggccaccacgaatgggttctaacggtgcgaagtttctgtggtgtaatctcggcgctacatgcatgtaagtacccaatttgtcaacagggcctgtgcctggccaggactgttcgtacccccaccacatccttctggatttcgacgttcaacggacattatattcctcattacgcaattttcatttgaacacaattcttccttcttcgaggaagaaatcatggcgccctttctcgctaccttactatcccgtgaacctcgatttgatccgactgtatcctctaacgaattcaggactcaatgggtccaccctagcgatgtattttccgtactactgatcctgggcggtgatattgttgctcgcgcgctggcacaacttgcaggaagtggcctgacgccagtcacattctcgtttggtatggcatctttaagccctattctaacgaagattccatgctaagtcgatgtactcgaataggatgggttgcgtactccgtctcggcgcttgtatctgccgttggcgaaaacaaactcatgccacagaacgtggattgcaaatgcaaagtcatcaatggcaagagtggatacagtagagacaactcgagctgggttataggccgtattgtgcgcgattttgatacatggagcggcactgctaccaaagagaagaccaaaaaacttctgggagaaaagtgggaggaactcaaatccctcgataaggctgcagaggagccaacaagagctggtcttgttgttactatctacgagccgagtgcgacaccaaaggccggcctagctaaacgcgatcttattttttggagcggcttgctcatcatgttattgcaattgggaattgcggctataccatgtggacttttcggcgattggggcattttgataattacggcatgcggcaatgttcttgccatcgtgactggagttctcccacaatggaagaaggaaaagtgggcgtgccggcctaagtccaagtattcctatattctcactcgaggtaacggtgcgcaacatgccatcgttattcttggtaatggacatggcttgaaccttgaggatttggcatctggacagagcaatgttgaatcctctactaataccttgacccgagctgttctcctcgccctctctatattctgggtacttcttctcatcgccgcagcaggtcttaggggaaacacttggtttcttctcgccatcggcggtattggcattgttcagaatgttttcgtcgctggtcgaagcatgaagccggagaattatggcattcatctagattatgtcggggtcttcggtaaaacgaaagtgatggatacactcttggatgttgaacagaagtatccaggcataggtcggagcatgcgtgacgagttctttcccggaaagcttcctctagccggagttcgagcgtgggaacagatcgaacaatccactgaatctgagcctcgagcgaaagcgcctcgggagtctcaagatgactctgaagaaactcaagctgaagagcgtcaagttgaagagcggatctaaaaagatccgaggacggctattgcacttatgattcaacgtcatcgcatagatatattgttcggtgatcgctattttcgacctgttcttgagcttatgatgaggcccaatcttctcccacaaggccggtaatgataggaaaatgggacggggagatttcattcataacctcctcggctctaattgatgcatcctcctattattgtgtttgattggaaggtctaaatcatttcttaccggaggaatcaagtttgattaacaggagcatttatttgaaaaatatacgatgcattcccttgccactctttgttcttatgcgagtccgagtcatcgcacatgccccgaatgaccaaacagggaaatgattcattagcctgcgacctccatctcaaagcaaaaaacgtcttttcccgctggaaggctatcccgaattgaagcatcctttatcaattgcttggaggaagtaagtcgtagtttataacagggctatcctcgtgctcggtccgctcgcgtcgcggtaccaaattagaagaatcatccgcacaaaacgcagcaccgcatgttgagttatgaataacttcgggctgaaacagtatgtctgtgactggttctggctgttcgtactactacttggagctctgttccttcgtatccagcaggcgcattgacatcagcctttgcggcgagaagtcgctctactacctggagatggcctccatgcgctgctgcttggagcgctgttcctccgtatccagcaggcgcattgacatcagcctttgcggcgagaagtcgctctactatctggagatggcctccatgcgctgctgcttggagcgatgttcgtccgtatccagcaggcgcattgacatcagcctttacggcgagaagtcgctccacgaccttaagatggcctccatacgctgctgcttggagcgctgttcgtccgtatccagcaggcgcattgacatcagcctttacggcgagaagtcgctctacgaccttgagatgtcctccttgcgctgctgcttggagcgctgttcctccgtatccagcaggcgcattgacaacagcctttgcggcgagaagtcgctctaccacctgaagatggcctcctcccgctgctgcttggagcgctgttcctccgtatccagcaggcgcattgacaacagcctttgcggcgagaagtcgctctaccacctgaagatggcctcctcccgctgctgcttggagcgctgttcctccgtatccagcaggcgcattgacaacagcctttgcggcgagaagtcgctctaccacctgaagatggcctcctcccgctgctgcttggagcgctgttcctccgtatccagcaggcgcattgacaacagcctttgcggcgagaagtcgctctaccacctgaagatggcctcctcccgctgctgcttggagcgctgttcctccgtatccagcaggcgcattgacaacagcctttgcggcgagaagtcgctctaccacctgaagatggcctcctcccgctgctgcttggagcgctgttcctccgtatccagcaggcgcattgacaacagcctttgcggcgagaagtcgctctaccacctgaagatggcctcctcccgctgctgcttggagcgctgttcctccgtatccagcaggcgcattgacaacagcctttgcggcgagaagtcgctctaccacctgaagatggcctcctcccgctgctgcttggagcgctgttcctccgtatccagcaggcgcattgacaacagcctttgcggcgagaagtcgctctaccacctgaagatggcctcctcccgctgctgcttggagcgctgttcctccgtatccagcaggcgcattgacaacagcctttgcggcgagaagtcgctctaccacctgaagatggcctcctcccgctgctgcttggagcgctgttcctccgtatccagcaggcgcattgacaacagcctttgcggcgagaagtcgctctaccacctgaagatggcctcctcccgctgctgcttggagcgctgttcctccgtatccagcaggcgcattgacaacagcctttgcggcgagaagtcgctctaccacctgaagatggcctcctcccgctgctgcttggagcgctgttcctccgtatccagcaggcgcattgacaacagcctttgcggcgagaagtcgctctaccacctgaagatggcctcctcccgctgctgcttggagcgctgttcctccgtatccacgaccttgagatgacctccttgcgctgctgcctggagcgctgttcgtccatttccctctgcggcgggtgcattgacatttgccgttgctgcgagaagtcgctctaccacctgaagatggcctccttgcgctgctgcttggagcgctgtttggccacacactcgtgcatccacgtgggtgactacttggagcagacttggtagtaattcactgcaaccttctctcgaaaccaaaaacaatccatgattcatgagagcaggagaatcgcgtccgtgttggataatacacctggcgagacgatgatggccattggtgatggaacttcgaagtatatgacgcttgatgttctctgttaaaatataaggctgacgccttatatagtacaaaagcaagtgataatgtccatatgctgacaaccattgtatcgtctgcggtacatcgtttctatcttcgtaggccttctgcgctgactcccatggtctgtatgcaacaatatcattcccttctacacatcggcagaacaatgaccaagccatatcctcagattcgggatgtgggtttgtgaggtgattgatccagtgatttcgggcgtattcgagaaagtgaaaacctcggctttggagttccatctctagacgtgaagactctttgtcaccaagtatttgttgggccttcctctctagctccccagcgctgagatgccgtaacttctcacggtaagaaagtagcctcagtgccattcgaccagtcatactgctgtaactgccgaagggggacattccaagctgaacaggccgtataggagtatttgaaccattctgaattttcgtcaactgacgcttaaaatcagtgaaatcgaggtaggtcatgcaaagaacgccgatatgccaatcaagtcccgccatattgaattcctccgagtgtcgggagttcgtgccaaaaaggtgtttcttcacgctatgatgaacatagtgcacagtgctgtcctcttcgtcgatgaatgttagaccacaacaatcaccaatgaccttattcatgtcgttggggagcttttttcggtcaagagacatttgtccaggaaaaagacctaaaacctcctggtattccatcgctgtcaatggccgcttcatcacaccacaaaattggagaattttgaacgcgtcttttcccaaggttctctcccgtacacggctgagttttctgtcaaatatttcagataggccacgagggggatgcttcaatgcatctaagatgtcgctgtcactgccttgttcgcagagctcttcgatgaaaagacgcgtccagaggaacctttatcgatcagcctagatacttgcaacataaaagtccaacaactttcactcctaatgataaagaattcaccaggacttcatgcctagctcgattgataaagatggtggaaaacccctcatcccgtcgcttgaattggatcatttcatcacttacattccgttggatcccttttttagggtttcaaatatcttcacaatgagcgtgggatcccccaagatcaattgtttgtcttctaggcagttgcctatagccgcggcaatatagcgatccatctccaagtcaacttttgtctcggtcaccgggattttgtatttgggtttcatggctccaaacaattggttttcaagctccgggcggcctgtatagagaactttgaagtttttaacgcgcatgttacaaagtttggccacactctgcgccaccttccggatctcgacaggttcacattcatccagtccatcaatagctagatagtatgtattgtcatcgtggagccgagacagtacgaaatcaactacttcagccgtattgaggtcattgctatcctcgtataggcgttgtagactttcatcttcagcgtgtttgatctgagagtctaatatttgacgagcaagactcccgataatgtttctcgctgacagagatgcagtgttgtccgcacgacaaatgtaataggaaataatgtcattggtatttcgtgaggcatgaagttgggcaaccacattagatataagcactgtctttcccatacccatcgtgcctgggcaccagagaattgcagtattttggtcatcttgccaatcatggaaaaggaactcttgcagtagccactccgctgtggagggcacgcgttgttggatagcttgcttccagggtttgacgtagtcgatggtagaaagattttgtctaatgctagatctcaagcttgcagcttccctcttcatcatgtggattctccactggtgcgcctcagtgtgttccttttgggtttcttttcggaatttatttgtcaactttcgggatgctgcgttattttggctctcgttttccagcaatttttttgtttcctcgttagcctgctttgaggcaagtgatatctgcagctgtatgtcctttgtagcttgctttagtttatcgagagggcttttgaaatcagactcgaagggattgaaaatagacgataaagtttgcgtgatcggcgggcgtcttgatacttcgatgatcttggtacacaattggacgatggctgcatagtactcgcatagctcacgttgaaggctgatacagtcgggataaagttgaccaaattgttgataggttggacacgaccttccgatctccataatcatttttgtgaccttgtcgaagtaagatgtaatattgcttgccgtcaatatagccatcttaaccccccccccccccccggggggggggggggggggggggggtcccaaacgccccctccaaccccttccctcccctctctgcctcagctggcccctcctctcgccgtggccnnnnnnnnnnnnnnnnnnnnnnnnnnnnnnnnnnnnnnnnnnnnnnnnnnnnnnnnnnnnnnnnnnnnnnnnnnnnnnnnnnnnnnnnnnnnnnnnnnnnnnnnnnnnnnnnnnnnnnnnnnnnnnnnnnnnnnnnnnnnnnnnnnnnnnnnnnnnnnnnnnnnnnnnnnnnnnnnnnnnnnnnnnnnnnnnnnnnnnnnnnnnnnnnnnnnnnnnnnnnnnnnnnnnnnnnnnnnnnnnnnnnnnnnnnnnnnnnnnnnnnnnnnnnnnnnnnnnnnnnnnnnnnnnnnnnnnnnnnnnnnnnnnnnnnnnnnnnnnnnnnnnnnnnnnnnnnnnnnnnnnnnnnnnnnnnnnnnnnnnnnnnnnnnnnnnnnnnnnnnnnnnnnnnnnnnnnnnnnnnnnnnnnnnnnnnnnnnnnnnnnnnnnnnnnnngccccagattagggcggcgatttgaggattggagctgataaatgtacccacgacatcactgaactgttgtgtcgcctccagaaatgtacacaacctcggtgccacacatctccttgtcgtgctgttgttggcgtcgatctccgtcacgaatgcgatgacgctcgcaacgtctggtttcgtagcgctgactttatagagtcccctttgctcctccgtcagaataccctcgaattcaatcaacgcctcccggagagctgttgtcggatgcggcacccgtatcgaaccggaatgagacaatgctacacaagccatcatgtcctccgcggccgccttgatatcaaagaaattgcgatttgtcgaatttttggacaggggatgggagggttcggatcaaatctaaagatacgattcccctcagctgaagggggctgagggtggtaaaacgtctaagccacgttttgtcaggcaacaagctgaagagcggcacaatcttagcctaaagtatgggaagttctagccactccatacagtaacaagacacgatgtacatgtatcgcttggcgtaaagaattgtatagtacactcacccttctcacccccggtcgcgcgaccgtaaaacggcgctcatccatttctcacccgggcgacacccacccgactatcgactgcgtataagccacacgccgctgagttacctagttataagctcctcgcctacgtaaggatcacgttgcggggtgacagaccatcgcagaccaatcgcattagaaattcggaggctaagaatagtccggggtagtagttgggtgggtgaccaccagcgaatcctcactgttgtatgtttttgttttgctttttgaggtagagaatggccgtttttggcgtcaattctacaggtcctcatattctggtgtagactactgggaatctgggatattaatacttcgggtagtggattttcctcggcccggaccacgtgctttccccaaggtacatgcagtgatgcacagtacgtttgtgttttattttaagatgtttgagtgtttatattcgaatgcttggaaatggaatactggactgtttgaatagtattgattgtactacttcatctacttattcacggtaagcttaatccacaatgatcttcttcgacagctctgagtaatgcttgaagaagccagtgaacaaacgaatggcatgggcaacatcataagtaccacctgtttcacggatactgtgcatactgagctggggattgcctagatcaagtgtccgcgcgcccagcgcagcagacagcatagggccaatggtgctgccacagctcgagtcattacggaccacaaagagctgaagaggaacgtggacgccagtctccttggtggtcttgcgcgcaatctcctccaggagaacaattccaggagagttcgtcgcatagcgagcgttggcgttgatcttaatcaccaagcctttgttcatctccggcttatggtctgattcgtacttccccgaatagttcgggttgaccgaatgagccatgtcggcagagacaaggaaggaggtggacagagtctgctcgtaggcagttgacaggtcggtgctcttggaggaggaggatgggaggacggatagacggcgaatgatcgatggaagaatgttcgagtccgcaccctgtgctgtgcggcttccgatttcctcgtggtcaaacaaggcaatcaggcggatcgcttcctcgtcgtcgagggctgatttatcggccacggagtcaatcagaccaactgtagcacagaaagtgctgttcaggttgtctagacgaggggagaagatgaattcctccagcataccgccgagacaggacttttgagtgtcgaagaggatcatttcaaagtccagaatatcactgggactgacaccagcctcgttagcaataagctcaacgaagtgagagtggtgacgttctgtgacagatttcaatggtgagaataattccccacccttgtctgtatcaggggtgtcggctccatcattgcggttaagctctgcagcaataaggccagcgatagggaacagctgtgtttccttattgaatgaaaagttttcctggcggtccagatggatggccagtgttggaacacggaggactaccttgttagcaaggcacatttattgggtcaacatgaaacatactgggacggtcaatcttgaccagtttctgcacgatggatccatcgctttcgcgagtcataacccgcccagcgacaccgagatcacgatcgaaccctgcaggaaattagcgactatgatagtttgaaggtaatcaatggcacgtacaagtgtgccagatgcctccgccgtaggtctctacaccgacctggacgaagccttccccgctcttcttgctaacgggtttgaccctcaacaccggagagtcggtgtgggcaccgatcatagagatggcattgcccggctatattcattgacatgattaattgaaagaccatttacgcagttccgcaatttatacatacctgccattgcttgccgatcgcaaaagccacgagggtagtagtgttgcgagtcaagtagtacttgcctcccggttggcaggtcgacgcccaagagtctctttcctattgatggatgagccacaatttattactccggtattcagcttgagccgaccttgatttcttgaaagccagccttatccagaagctgtttcgcttcgtggacggcatggaaagctggagataagacaaatcagcgacattccacgtcatcgatagaactacatacgggtaggagcagcattgacaaaggtcaagaagtccagagcaggttgcttggcagccattgtagaataacgtcgagaacaaccaataatatcaggacaaagacgcctaaggaccattgcagggtgcacaaagggagagagttggcttttgccgccggaggttttaattggtttggcggtgactgcggccatgtcacgtaacaaagccaccagtgaaactagaagggagtcttagggccattgatattcaggtattcaggacatggtaggtttcaattattactatttgaacatggatatactattctttggtcgaccccactatgtaaattcctagaagtcaggcttggtatcgtcgttgccatggcccaagcttcgtcgcgtcgcgtcaaagcaagcgcgtatatcgaatcaataatctgtggatttcgcgttagtgaaacggtcaatatggagtacagatccctcacatcccccccactttaagtggtccagttagacggtgtgggcgcgtccctttctgtaaacaacaggactaacactgtggcatcagtctcgattggaacaaagccatgctgacacaggacgtttccaggaatctcggcaaacagcatgagacatagtctgggggagtaaacaaaagagatagactccactgctgaaataaattgtcgatcaaatatcaatgagcgtagtcaaaggcaaagacactggatggggccgattgccctcgctaaatcgggttagcgtacccgacgcgtgacctagagagtcgccctgcgcaactccgtcactcccttgaagacattcattcattcacatgccgacagtttagacgcttctgtgttcatttcctggtgaaagagggtttgatagtgctttatcccggaacttgtgccattttcaggtgttaacagccggggcaatcattccacctttggatcaacaacaacggaccctccgccaatcgcccttcaaatacccttgattctacacccgaatctctgaacgttcgacatccttgattcacagaacttcacttacatctcatgcaattcttatctctatcttgatcggctgcacttcgtctctggggctcgggcagacagctagggaacgccatggcggatagacctcagaatttaaacaaggccgggaataggtcggcaacaaaaccacaaaaatcgcaggtctcaaatatcgcatcaccacctggatcgaagacaccgccaagcatgccatcaaagcgcacgatgtattttccagacaattcaaatttggggaacggccaacggcaggatggagcagagccaatcgaccctagtgcgcttgcgaaagcattgaaggattatgagtctgctgggagccggcgggacaggaccccagcctccagtccgtgtcgcaagagacagcgggtctacggggatcggtaagccacacttttctccaatcagaaagctgcgccaaaacaatggcagtcatctgtgactcagctactgatcataattcagcttcattcccaatcgcgacgggcaagatctacaagcgacctatagtttattgcatgaagatggctgtccatctactccttccaagaccaagaaacgcccccctcactccgagcttcatttccaaaagagtgtgttacatctcggaacccaatgcgttgtacatttgacctgactttaaccgcagctgaggaagccaaccgtacattttcccgagttttgcgcagcgagctgttcggaaacacggtcccacagcctgacttgacctctgcgccatccgacccattgctcggcttcagcaatggaatcaatgacaagacccgatcccatacacctcccgctcatatcgcagccaatctccctcctgccagcatcaccccaaccaccccacacaaaaacctcttcaactatgggccttcacggcccggatcgggacacccaaccccctctaaaacccctcgaagtgtgcatggccctaacttagacgtgcgctccgagctctacagtctttcccctattcgatatgacagtcagcgtattctggaaacgcctcggaaacaggcccggtatgtgaacaaggtgccttacaaggtcttagatgcgccggatcttcaggatgatttctacttgaacctggtggactggggcagtagcaatgttctcggcgttggattggcaaactctgtctacatgtggaactctcataccggtggagttaccaggctgtgcgagctgaaagatgataccgtgaccagcgtgagctggattcaaagggtaagcaagaagtctgcatgttaacgctccacatatcatactcatacaggaaatatagggcacacatcttgcaattggtacaggtaaaggtctggtacaaatatgggatgctgagcattgccgacgactacgaaccatgattggacataccaaccgagttggcgctttggcgtggaacgatcacattctcacttcgggatcccgagaccgtctcatttatcaccgtgatgttcgttctccagatcagtatattcgaaagctcgctggccacaaacaagaagtttgtggtttgaagtggaacaccgaagatggccaattagcatccggcggcaacgacaacaaactgatggtctgggataagctgagcgagacacccctctaccgtttctctgaccacaatgctgcagtcaaggccattgcatggtctccgcatcaacatcatcttctcgcttctggcggtggtaccgctgaccgcacgatcaagttctggaacacacaaaccggctcaatgatcaaagaggtcgacactggtagccaggtctgcaacctatcttggtccaaaaactcagacgaaatcatcagcacacacggttacagccagaaccaaatcgtcatttggaaatacccgcgtatggaacaaatcgtctcgctgaccggtcacactttccgcgttctttacctcgccatgagccctgacggccagactgtcgtaacaggagcaggcgacgaaacactcagattctggaaaatattcgatagacgtgctacaagagacactcgtcgggaaggcagcaaactggccgaatggggcaccattcggtagttcgcaatcccctctatttctaatttgcctttgcatctgcattcgatatggcgttttgcggttcacttaatttggtcactgggggaaaatcattgcatggcctgcggggatctgactcttcgtctttttatgcgtcggcatctattgcatcttcttttctatcggtggtttagagcatttcaggtggacgtccggcgctcgttcattcggaatggggtaatgcttgtttgagttttttttttccttcaatttttctttgctttttctgttttttcttgccttttttgatctcttccatcggttccttccaactctggctgtgatttagcctagttatactagccagacgccttcgagtcaagcgaacaactttacatccacgtttcttgggctttgagcggcggcgcttgtggtgtttcctggttgctggtatgcggcgttgcgcggcgggtgttctcattgcaatttgtctttcgcagggttgcttttgatgatgagatgaccctctttttctccggcacgaatttgtgcctatgttcctatttcagaggatttagctatgccaaccggccttcatggggatatacaccatggaaatgagaatcaaacttgataatcacttacatgtttcttggaagtccaaggctgattcaactcaactaagaccaatttttattattgtggttcaattccctttctcaagtgaagtaacccaattaagaaaatatccgattaactatgctatactgtatacattcatgaatgagtctcgcttgcccagtttttggctcagcaacaaacaaaataaaaagctcaaaaagggagatttgaaacataaggaaatctaaagcaccaagcgcgccggctcaacagagagaagagtcttgattcgctccaagaatgccttcgcgcggacctcctcaccagcagggactgtcaagctgaaaacattagaagcaacacccgcgctctcaaccgaagctgcaggtgcagacttcttggacggcttggcactaaggaaaccgatcaggtcttcggtaacgggcttagagcggacagacttaggagcgtcgaaagcgttcaggtcgggaacgtaatcaccgcgtgatgtgttgatcggctcggcgccgagaatctcatcgaaaagctcgtcggcggagggcttagagttagctgggcgaggcaggtcgtcgttggcaaggtctgtagccacggcaaggaagcgggacagcggcactgtcacacccaggttatcttggagcttcttctgcgcagacagcacggcggccagggaaatggagatggccacagaagtcaaacgcggcggctcggccacaaccttcttttcgggcacggccggtgcggccggtgcggccggagccgcaatcttgatgttgctcagatcgaggtgggtaagcttggcaagtgtggcggcttggtttgacgggtagttcgcgggaatcttgccgatgtatgcaagcacgtcgcccttcaagagacgacccttggggccggaggctgggatcttggaaacgtcggactcggggatgcccttctcacggaggagctgcgcgacggaggggtagagtggataggcgatattctgggttgtgatagaggtagattgcaggcctggagagtgaaatggatgacgccgttagcccatgtagtaatgcttgttatagcaaataagttccgccgtagcattgagctcagaggaccggctttccgttgcagagatgttgttcgccatgaacatggataggaaactcacgtctgccgacaccgaacaccttcggttgacgtcgagcgaacatggccggaacctgaccgactgtgatcctggctgccattgctatgtgattctgttttggaggattgggagtactgcggtgccgattggggtattcggccggtgtcgcaactcgccgcagacgctagatttggaatgaacgagcagaatcaacgaagagcccaccaccacgttgaagcgcacagatctccaagttcgatttaatttggggtcgtgtgtttggagagacaatccaaagtaaccgttggagctgtggagggcgttgggagctttcaccggcggccaagacgggaacctttttctgccgcctgctgttttggctgttatcggcgaatcccgatgagaacgacagttgaccgattctcgtcctagtaagttacagaatgaacctattcagtcgttgactattcgtccattttcccccggattcatagctgtcaattgactacgtgctatggccttaatcgctttactaacttgaacttccataggctcatcgcagccatgtccgtcagaccacccaccttctcaatattctggcgccaatgcctacaaagtccaatgcgacctggctttcagatgaactcgacatcttccttgcgctacttcaattctagtgcaccccattacaaggtcaagggtgtggccagaactgtcgattccgcgtggcaggccgcaagtccttatgggaacaagaacccccgtgccctggcgaagctgcaagcgaaggtattaaaagccggacaagtgcttttattcaaggcgccttctcatcgcccatatgtcttgactgcgtatggtctgtccgcgttttgcttcgcctattccatctacaactcgaacgcggttctccgggatcccctggttcctattccgatgtggcagaaatctctatttggtggtatctgtatcatgatgagctttggaggcaccttgttcatcctccgaactggctccctagtcagaaatatcaaggcgatcaattccaatggtcgtatgcgcgtcctcttcacagtccgaagcttggttcctttcaagaagccttaccaggtcgaagtggcgccgggtgatctctctttcaagcgcagaatctctgtctctccggaaaccatgaagcattacgaggaaagtaccaaactcggacgtggattaaaaacggagccaaccttgttcacgaggctgcaatctatgcctcgtcgggttttccagagcgtgcggcaacttttcacaaacgaggacttcatcattgtgcaattggcggggcacaagacccatttccgactggactccaatggatacatctcagatgatctcctgcactttgggcgcatggtgaatgtgaagatgccattcagagattgatcgatgatcatatccaagtatcatacccagagggtcgcttcatgtgtcgtatctagttcagtttgtacatcattttggctctgtctcttagatggcgacaccctgtaacactagttaaaagcgcgatttcaatcgagaatccaacaatttatatcattagagtattgcctgtcagaaaacgttgtagcatgcaatgccgcatcactaaatttgggagccacgtgatggccccggcgcgtcctaggtggacgcggttcacccgctatcgcgcccctcacacatcttgcgcacaacttaatctctgcttaaataacagggttcttgaattctcggcgcgttgctccctcagggaagccgctggcaatatgggaaaactcattcgtttggagcttttcagtatgtaccgaccggaaggtgcgcaggcagttgctaactttgttactagacttcaagtcctacaagggacatcatgtcctcctattcggagatgcgtacttcacctcaattattggcccgaatgggtctggcaagtcaaactcgtgagtgcctcctcgcctcagtctaaaggacccaagctaacgcgcgttaggatggatgccatatctttcgttctaggaatcaagtcctctcacctgcgatcgagcaatctccgggatcttgtctaccgtggccgtgttttgcgcacgtctaaagtggacggagaacctgctgctgatggacaggatggcgaggaagaggaagggccagagagcatggatgtggagcaagatgccggtggaaacgacccaaagtccgcttgggtgatggcagtctatgaggatgatgcgggtgaggagcaacaatggcgccgatctattaccagccaaggtgtcagcgaataccgcatcaacaaccgaatcgtgtctgcccaccaatacaacgaggcattagaggaggagaacattctgatcaaagcgcgaaacttccttgtgttccagggtgatgttgaggcgatcgcatcccagtcgcccaaagaccttacccggttgattgagcaaatctctggcagtttggagtataaggtcgactatgaaaagttcaaggcggaggcggaggaggccgcagagcagcaaaccatccagctcaaccgtcgacgaggcatcaactccgaagtgaagcaataccaggaacagaagcgagaggctgagaactacgcgaaaaaggccgaagaacgcgaccaggccattatcactcatatcctgtggaagctgttccacttccagcggttgatcgacgactccagtgctgatatccagaaataccaaaatgagctcaaagaataccgccgtggcgttgagaaatatgataagaacgtcgaggatgccaagaaggaccatgctcgagtcggcagagatgttggcaaggctgagaaaaacatcacaaaaaaggagagggagattgaagaactcaacaactcacttgtgcctgtggatgagaagatcgacatcaccctgaagaaggttgagagatacgcgtcaaagattactgagatcgaaaaggagcgcacatcacaatccaacaatggcaagcaactagaaaaggacctcaagcttgtcgaaaaagctcagacccaatgggaagttgaatggcagaagaccatgagcaagaagggtggccagctgagcgaagccgatcagcaggagtaccgtaaactcagagaagaagtgaaccgacgttcatcggcggactcgttgaaccttgacaatctgcgacggcagagaaagaccgaagctgaagcagtcaatagcttgaagggcaagtttgagaacactgaatggcaactgaagtcagttgaatccgatgtccagaacatgaacgaacgcaaggcgtctctcaataacaccgtcaagtccacatccaaagagatcgagcataagaagaaggagttgaacgccttgacttccgagcgtttgaaggtctcgcaagtgcgaactgagctcgaggaaaagcttcaggtcgtgttaaggaaacttctcgaggctgatgatggtaagaagcagactgaacgcgaactccgcgccaaggagttgatctcggccttgaagcgcatcttccccggtgtcaaaggccgtgtcagtgatctttgccggccgaagcagaagaaatactccgatgcagtcagcaccgtactaggtcgacactttgacgccattgttgttgataacgagaagaccgcgaaggagtgcattcagcacctacgcgaccaacgcgcaggtcaggccacgttcattcctctggaaactattcaagtcaaggcgttcaactcgaacctgaagggcatgcatcggggcatgcgccctgccattgagactattgactatgatgattcagttgcacgagcaattagttacgcgtgcggcaactctattgtttgtgacgatctggcgacggccaagtacctttgctacgaaagaaatgtggatgcgaaggctgtcaccctcgatggaactgtcatccacaagggtggcctcatgactggtggacgtggtcctcagcagcagaactccaagcgctgggaagattccgaggtcgagaacctatataaattaaaggagaagctcatgggcgatctcgcgaccctccctaagagtcaccgccgaggctctgaggaagagaccctgcagggcgagctcgtcggtctcgagcagcgcctcatttactctcgtgatgagttgaaggctcttgaaaggaacctcgagagcaagcttagcgagctggacttcgttaagcgccagatggaagaactgcgacccaaatacaccgagcgcaaggaaaaccttgatgagctagatgagacaatcgaaacgtcacaagcttcagttagcactgtcgaggatgagatttaccgcagtttctgcaagcgcctagggtatgatgatattcgagaatatgaagcccagcagggctctatgcaggaagaggccgcacaaaaaaagcttgagttcaccacccagaagagccgaatcgagaaccagctcagctttgagaagcagcgtatccaagcaaccgaggaccgaatcaacggccttaaggcccaatacgagcgtgatcagggcctgattgaagagctacaaagccagcaagaaggaatccgcaaccagctcgatgagttcgaagcggaacttgaactcctccgagaggccctcgagaagcaaaaggaaatctatggacaagcagcagaaaacttggcagagcagcgtcgtgaactccagaagcgtagcaagcacgttgaatcagcgttaaagaatgttaatgcacttgaagcagacattcagagaaactcttccagtcgttacactcttttgcgccgctgcaagcttgaagacattgatattcctttgaccgagtcttccaattcccttgacaagcttccaattgatgaccttgtgcaagcagcagaccctgatgccatggaggtggatgaaggagatggtttggacgagactgcccaggtgcatgattacggtatcgagatcgactttgattctctgggtgagaccctgaaagaggtttgttctcctatccattgcttatttgtcacatactaattcaattccaggaggccgatgacaagctcgaggatgaactgctcgacaaggtccgtgttctcaacagtgaccttgacaagatggcaccgaatgctcgtgccatggagcgcctggagagtgtcgagaacaaacttcgcagcaccgaaaaagatttcgacgacgcccgaaagtctgcacgaaaggccaaggaagagtttgagtccgtgatgaagctgcgatccgacctcttcaacaaggcattcacccatatttctgagcagatcgggcccatttaccgtgaactcacgcgcagtcccaattaccccctgggtggtcaagcgtaggtttcctcaactcccgactttgaataatcgctaacatctcaaagctacctcgatattgaggactcggacgagccatacctggacggcatcaaataccacgccatgccccctcttaaacgtttccgagacatggaacatctctccggtggcgagaagaccatggccgcactcgctctgctattcgccattcactcataccagccgtctccattcttcgtactggacgaggtcgacgcagccctggacaacaccaacgtcgcccgcatcgccaactatatccacgaccacgcctcgccgggcatgcagtttatcgtgattagtctgaaaaccggactgttccagaacagcgaggctctggtcggtatctaccgggaccaggtcgagaacagcagcaaatcgttgacgcttgatgtgagttttaatgtggttcgtatgcgatatggaaatatgctgacaatgattgttccagcttcggaagtacacctagatcggtggtatttatgcggattgtgtgatgaccctttgcttttgctttgcttatttcttcatctttgtagattattgagtcttgctggtttgttttcttcttctatcagtgtcgatcataggagtaggaagcccagtgtctattctgagcacttattcctatcggcaaggctgttaattgataccagttcctgtactgtgtttttcaagtcgttccaatctttctcatacgtcgtacctgcggatagccctaaaaatatccgtttccgaacacttaggtgccgactgttcatacttctacggattccagaaagtggctcgtagaggacttctcgaaagtagatatgaatagattcaattaactccatctaactagatgtgttaaggccaccatgttgaaaacctcctagaagatgctcatggcaaaagataggagagagataccaaggcctcgcaaaaaaatagcaaaaaactgaccacctgtaaaaccacgaaccgactgacttccaccatgtagagaggcacttgttgaaagcaccggcgtgggaagagacaaatcgaagtctcaaaagaagaaaaccgagaagaacaaaaccaagattgagaaccgtgaaccgaaaagacttttcatccgcgagacttgcgacctattggagggaccaccatagcgagaggcaggtagtcatcgaggcctgataagtcagatgccaactagtttgtcgctgtctgtgccacaacctcaatttccttcgcaggcttcaccttgggagtgatcttcatcccagaaacagccttggctagaatagcagccttggcctgggcagcactctttacctgggcggcattcttggcttgggcggcactcttgaattcagcagcagacttaacctgggaagcagtcttggaaggagtagcagtcttgaccccagcagcaggcttaaccggagtagcactcttggccttagcagcagccttggctagaagagcagccttgacctcaggagtgatcttaaccggaggagtagccttggcctgggggataactttggcctggggagtaactttagccttggttccattggcggtggtatgcttggtctgagaagtagtagagtcgacctgagttgctgtcttggtctgaggaatggcctcgggctcagtgacgggctcggcttcggtgggcgtcttaatcccgctggtatcagtgagatcctcggaggacgactcaatatccacgccagaggcacgaacagtctcaggagtagcattaggggaagcttccgaaccagtggtctcggcgacagagacaggcggagacgggttggcttgttcgccctcgccaagtggcttggggacctggttcgggatgctcatgagaatgttgttcacggcatcagggtttttgtgaatgtggaccgtgtgcttgagcttgtccttgaccttgaagtcacagggaatgagacggtaggggagctcctggtcgcgatggtactcgtagagccggactttgtagccacggatgaggatggcccagcatcgttcatctggaagaggggcactgagaagtcggggaacgaactgatcccagtctgcctggactgaaacagaggtgtcgaggacgaccttcacgatggtgtgcagggatctttcatcgccagaggctttcacgacgaagcagttggagtggttattctcctcgtcctcttgccacttgaggacccagccatcgttcgaatcgaaggcgtaagtaaggagagcgctgaccatgatcttgacattctcagcggttgggttagcctcgtaggcgttgatgaattcagcaatagcaggaagcgagagatagtttgtggtctccatgattacgaagttgaaaagcgttgctggtgagcagagattgatgaacctggagaggaaggaagtcgcaggaaggaagtggcaaggactgaggtggaaatgcttaaggtcttggaatcgcaagcgagatcaggaaactgcacgtaacgtgaaagtgggaaagtgtgcgtagaagagtgaattgaggcaaacatttatacttgtagggttagttctacctaccctataaacgcgtgtttgatcaaagaaggcgaattatcaaagcaaacattagtctcccacttgctactgatctgtataacttcatatgtttctatatgtactattacaagtaacatagaactgtgagctaagtgaaaggtcgccgtctacgtccatagatatatatctagatctagtgttagtctgccaatgactccatattctgagcattcaccaggacacaagcagactgaaaagcaaatgaaaggaagccaagagtaagccaggaggaaatatatactgagtagacaggatgatgtctgctgggtccttcctatctgggctgtcgtcgcttccatgggctcggactgagatgacttcagggcttagtaagttgaatgtctactgagtgcactcaggcaaagtgtgcgctacaatagatctcaatacaacaaattattatcttctattgttcaaagtctgctcattgactcattttgtcatctcaccaggccaagcagaatcgtctctgactaccaggttcaagctcggctcatcccaaaataagttacatgagcttcattcacatgtcctctctgggcctcgtagctctagacctcatttgatcaatactagagaggagcaaagatcatacctgaggccagactcaacagaatctgcatatcctcctcactagtctctgactttgtaggtacatggagtggccaagcccaccatcaagctctgagcgactgattctggcgggggatttccgaccgaataagttctcaagaactggtgatcaccaaggcgtgagataccatatgcggattggagacaattgcaggatgtcctgaaagtaatcacagagctgcatatactgcacactcacatatgtacagcgacatgatctatacgatcaggtccgaaggcatccatgactgaatggcgtgcctagtacaaatgacaccgtacgttggaagcatggatgagattcccgttatggcttcctgcctgagaaatccgcaaggcgggatagtggctgactggggcaccggaaacgaaccgatcgcctattattgctcggactcttagccatcagggtgagactactgacattgccttgttcgtatacgaatcggagaatggcaagcccgtgcgacaaagcgatgtcacgattggcaaatactcgggagtcaagggcttaaaattgagaatcctgatcaagttgataggagaagcgacccgctctcgattttgggtgtgttctatcgagtcatgggccccagggtaactggaaagcttgagggccgttcgtatcgagccctacccctgtacctgggttgagaccagcagttcgcaagtgataaagtactggaatcctgccctatacctccagcgacactgtgactggtcagcgtgctgaaccccgactttgtatagtcggctgcatctgcacagacactccttatctatcctccacgctcgaagcggttctaggctctcccttgacaacttaatggagcgctttacacagacggaatccgtgcccactaaggataaaaccaagcttcgacggggtatcgagccaatagctctaatcgcctctccctgggaacccgacgccaagaacggtgagacgaacaacggggtcatcgggtgcagtctacttgggtatagtcaacgccaccggccaaggaactgtgagcccatgttccaagttgcaaatcatgcccagtgtcaacgccccggacacacggagacgacctgagtgagagttccaataatgcaagtctcctgcaccgataccctgctaccgggatttgggcatctgcacccagctagcaatggaaatgggaagtcagcgggagcttcgggtgcattacccgagatttgtgcttgagaacattgcgcaatataagtatactacagcagcgacactcgatattcggttatcgagaaaaaaatatagtgaatatgcaatcgatcgtggtgtaacggtagcagtacatatatattgtgggaacagctggcgtccacgggcggatggatctgctatgcgcataatgtggctattataggggatacattgtacagaataatacacacagcgcacaacagtagagtcgctcgtattgtactgtacgttggatgtcgtatatcgcgccgatcatttcgtctgcggcccgcacataggcaaggggcgcatgtcttttgcacactgaccattcgattctcgtgtggggagtgttgggtgttaccgagttggggccaatgcggctcagaagggaaaaccccgtgtcactgattgcgtggaagtattttgctttttcccatgaggctgcctggcaaacggctggatattcgattctcaagccatcggatgcgtaccaaagacagaaagtataaaaggcggatacctgctgtccctgtcttcaacgggattacagtatactagtccaatgtcacgatcaacccgatctctcgcactataaagtgaaacagtaccgttatattaacagcacggaatatgcggcccgaggcccatcggcgagcatcaaagggcgacggctatattttccgcatttgtaggtggagtcgagcaataagagcgccctaaaaagcaaacacgaacaaaaacaagaaacagacggtggggaagacgaagggaagatcctagctaatcatagccatttccaataattgctggtcgtatacggaaaaagaaacaatgccatgatagttacgcagtagagtgatcaaatccgcaatgatcagcttctttcccgtcctgtcgacactgtcgatccgggagcagggaaccgatcccaatggtagttgactctttcttcttctggataggatggagtccggatacgacaatatcggtgggaatgcttctctagctccgggttgcgacgtccgcgtatgcacgatgccgaacaggagttgaatctgaagactcataatgtgtatttgtagaaaaagaaagaagagaaaaagaaagaagccatcacgaaaataaaaaagaaacaaggttgaccaggataccgtcgggcctggcatccgcgcgtccggaagcagaaaccgacttccgcggacttgaaaataagctcaagattcgatggtcgcgtttaccctcgtatacgaagacattcatggacccctgttgtacatagattaggttgaagggcacggacaatggtggaccaagcgcggtggagatggacattggactgacaggaggaagcgaagagaaggaaagaaagggaagcaatctgcggcgcagctgatgtacggagtagtcgagcgtatccataggagatccatcacgaaggagagattcacctagacccattagtcagtgctttattagcctctcttggcttgcaggagatgatctcagaggcgtccaggatgaccgctcttctttatcacttgtcctgcccagggatcgccgatcggttgatacgattggatggtgatttattgattactctatgtctgcatgtattatttctgattctgataattgggctagagagaagtggtgtatcagacgggaagtatttcagaaatggattgctgcagatggctaagacatcgttagggcagttagggcaagctaagaagttaggtaaatcatttaattgaataatcaaatgatttaaaatagaaattgagacgtccagaggtgtgggccgatctcggatcccccgacagaaccatggatcgaacaaggttatgtgacactcatccatggctcacagccctaagtgtcagtgcgcagaacggactcgacccatcgactacacatcgcaaaggggcagacgcagatgggccaatcacagccgccacaccgaagtgatacggaggctgccctattgccacacgctcgctttcgcagctattcctttttccttgcattagctccacgccgattcgtgcgttcaggagacgtcggggtggagatatgccaatcctcggggtttggcgtcggaaatgggagatcatggatagcccgtattggacttacttggtatatttatctccccttggaccctgcccctgatcgaatggtcccggacttcttatccatcggcaagctgtgttgactcttctattaattgacaccgtggattgctgggcattctgtatatctgtgcacgttaccttgaaaagcgcagcctgacctggattcgacttcaaccgtactatctgattctcaccatggatatgaatcgatatccagttcccgaagaggtcttggagagaagacactctgatacgtgcatcccacaccagcatatgaacatggtaatagaactattgcaaaccaaggcacatcagtgggctaacaaccaatagccgatcactcctaaacagccccataccgaatatacacacccacacttcgccatgatatacctcgaccacaacggtcaatggcaactacaagcctcgccctcaattgcaggctgcgaaggcgccatcttcactcaagatgttacagaccgattcatagaaatgactggccagacgccccaaaccagtccgcagttcccaagtgagtcagattccatccaagttccagaacgacgctgacatcctctccttgcagacccgacccaagcaccccactccccttgggacgagcaacctgcttcgggatgggccccgcctcaggcgcgacaggccgagatgatcccgttccaatggtcatcacagcaaagccgaaaaaagtcgaggcgtgccggcggtacgcccaagtctcgaccgaaatctacctcgccgccgcctgtcgctccggctcccgggcggacggtccttcgtgtcgggaaccgggcgctgctgcgacggtactatgagaaggcatttgaggatttccagcagctcaactgccgggcgattgcgaaatcctatattaagcttgtcgagccgaggaagcaggtccactacccgtataacgggcgcagggtgattgccggtgtctcgcagcgtgttgacccggagttcacgaagcctgcgtggtggcctgctggtgtcttgcacaaagagcctgatcatctgctcaaacctggtgagcatatcctagtatcacgatatgaaccagattaatactgactgaccatagatcgtctgcgacttctggttcatatcctctgtgaactaaaggatagccacggagtcacaacggataagctgcgagaagctggccaagacgtcagacggcagatcacacctgcccaccggctgcaggttctcgacgagatctactttgtgcgccaaatggaagaacaatatctggatggtgaaatcggtatgtatccctatcccggcaagattcaatctacagttcactgacatgtactatagacgccagcaccttgattcagataacacagacacatctacccgaagcaatcttcccagacgatgacctatcatctcgtgcacacgcagcacccgtaacagccccttccatcgaggccgaacataacatgcacgacgcccgcgacaaccctgttatctccacgctggaagacgatgacccaaagctgcaccactcgcatagtctgcccctatcacccactactagcgagtccagtggtccacacagcccaactggcagtttcggctacccaatagccatagcaccctccgtgcatgtaataccccctctcgagtcccccaatgtcacaaagtctatacatccagacccgagttatctgtcggggtactactcgcagcaattcgtgtctgataaagcgcctgggttttggccacatgccaatactgcctcgcagtatggctattgatgttctgtttctcttgttttccagtacataactggagtttgagcgtttggctggacacggatcttgggtttcattggttacttttccatatatatattttcttaggatggtttgttaattagcttccatatacgagaagtcagggagaatgcaaattaatggacaacctgatctctcgtagagtcgaccttatgaattagctgcctcaggagtcaggcgacacctgggccaagacggctcgctgattgggtccgcgtgacgatcccctagcgcagctcctccatccaaccaccactcacatcgccagcacacgtcaattcctcaccttctcgctggctcttgactgtgtgtttctccaaccttttggcctgcaccaaagcatcagaagccctacatcgccgtttccgtgccatgcgccagtaagcccgcagttgtttacttcttggatcgccaaccacagtccgccatccgcgccctccgactccaacacacgcgtgatctaccgataaggtaactttgccgtctctttggatgattacccctcatatctatataatggccgtgtcgttcggcacttgtgtctgtttggcacatctaaaaagtgcttttgaagcttgcaactatggggatgctaactttcaatcggttcctcagtcgaccgtatcccaacacccgggacggaccgacaatactctgcttccagcaacagtttctaatggaaagcaccggctcgaggagaaaatccgataccatgtcggccgagcctccggtctccacgccagtcgtggaggatgtgtcttcagatgactccgacaacgatgaatccgactctcctgccataaccccaggaaccctgtcgcgcaacggctccttctcaaacagcagctcgtacctagaagactgggagtcatttccaccgctggacaagctgactattttcgacctcctcgacaacatccacctctcacagcgtctggagacttggcagcagaccctcgccgcgcaaagggagaaggtgcgcaagcagcgggagaagctgaggttgtcgtccttgaatgccaaggaccgtgttatgggtgaatggaagcgccatgcaccgaccgccgaggagaagctggagaaatatcgtgctcggatgaagcatggcgttgagcgtctcggcaagcggtggagccagacggcgactgtcaccctccgggagaagatgtcgtttattgctggtgtgctcaatatcttcatcagcggctacctgatcggtgcttgcccggagtacttttactactggtttagcggccagctggcttttttcatgcccatccgctactttacataccatgctaaaggctaccactacttcttggccgatctctgctactttgtcaatttgctctgcatgctgagtatttgggtcttcccgaactcgaaacggcttttcattagcacgttctgcttgactttcggaaacaatgcggttgcaatcgccatgtggcggaactcgatggtgttccacagtatggacaaggtcgtcaggtacgttacacatcgaaaggaacaagttcatcgctcatcttatctagtctcttcatccatattatgccacccgtgactctgcactgcatcgtacacctgactccggttgcgatactcaaggaacgcttccctgctgtctacgacatcaagttcagtaagcccggggacccagagcattatggtcttggtgccatgatcctctggtccacggccccctatgtggtgtggcagctcatgtaccacttcctgattaccgtgcgccgccgcgaccaaatcgcagcgggtcgtccgaccagcttcacctggctgcgcaagtcatactccaaagcgtggattgggcggtttgtgctgagtctacccgagacgctgcaagagccatgctttatggtgatccagtacgcgtacgctttgtccaccatgctcccctgtccgatctggttctggtacaaatgggccagcggtctgttcatgtctgcgctattcgtctggagcatccacaatggagcgacctactacatcgacgtctttggaaggcgcttccaaaaggagctggaacagcttaggacagatatggctcgttggcagaactctcccgaaggatcaactagtcctatccttatccctgagcccagccctctcagtgaagccatcaatgcacacagcgaggagaagcgatctagcgttgatcgaatccctttgttggaaactgccgatgtctcctctactgatataccggagaaagacaacaaggattctgttgttcgagagcgaatttgaacattacgagataccatgttgacatcgttatgccagtctttatataccctttgttggttcttgtcaagattcatgagcctgaattgagcgagtcggtttatagatgtacacgttattagattgaatgaatgttatgaaaatacttctccgtcggtccgttctcgaactgtccgggatctctttaaccccgagcaaaacccgaggcggtctcggccgtcacgtgccagatgactgcggcagtacatcacaacatctcgtcggatccggttccaggacattccaaacttgtgaccgacattttattactgagattttttttttggatcatcctctggacattaagattaatcattaatttcattattgttgccctataaaccccctgttcgctcgttgcttcgtgcaccaactttttcaccgtttcccgcaaatgtccgctacaatgagatcaaccggattagtccgcggaacacctgctttccggtctgcactaatcggtaagtgacgagtccagaaataaatggaaatgccagttgctgatacttcccagcaggccgtagtcgttccagtgcattgagcccggcctccattgcagcccgcagccttctacgaaatggccgcgatctgccatcccagatctcggccctggccatcctgatcccgcagcgtggatatgcgaccgagccaacccagtccaccaactcttctcagaactaccctccccccgggttcaatgccgagcaggccaagaagccgctcccccaggaacagaccacgcagccacaatcgacggtggcgaagacccccgagacacaggcggctgctaagccggctgcctctggagaggttgcgaagacgagcgtggaggagcagaagttggctgagaagaagagcgcgaaaaagttgacgtttggacagaaggtcaagaaggagttgcagcattactgggatggtacgaagttgctttccacggaggttaagattagttcgaggctggcgttgaagatggccggtggttatgagctgagtcgtcgagagcaccgccaggtatgcgccactacaatatttcgatttgacgattggctaactgagtttgattagctccaacgtactacaaaggatctgggacgtttggttccgttttcgatgttcctcatcgtaccatttgccgaactcctcctccccgtcgccttgaagctcttccccaacatgctccccagcacatacgaggggcagaaggcccgtgatgccaaggcattgaacctcagatcgacccgcaaagaagtttcggcatttctacgcaacaccattggcgagactggtctgcctttgaccgcagccactgtcaagaaccacgaattcacagacttcttccgcaagattcgcaccaccggcgaatcgccctcgaccgaggatgtcatcaaggtgtgcaagatcttcaaggacgatctgacccttgacaacttgtcccgaccccagctggtcggcatttgccgttacatgaacctgaactctttcggtaccgacgccatgctccgatacactattcgccaccgtatgcgccagatcaagcgtgacgaccgcgcgatcttctacgagggcgttgattccctctccgtccccgaactgcagatggccggcgcctcgcgcggtatccgcacacacggtgtctcccccgcgcgcctgcgcgaggatctcaccatgtggctcgagctgcgtctcaagcagggtgtcccctcgactctgctggtcttgagtaacgcctacctatacacacagggcaaggagaccgagttctcgtcgcaagtcgacgcgctcaagtctgtgctctctagtattcccgaggagctgttccacgagatcgaactcgaggtgcacaatgccgagggcgctgctaccaacaagcagcgtctggaggttatcaaggagcaggaggagctgatctcggaggagaacgagcagaacagcaagaatgaggtcaagggcgtttccgtacctaaggataccgaggatatcgacgagaaggaggagactaaggtccagcctccggtcgatggtgataagcagtctgctgaggccaaggatgctttagcggagggtgagcgcgccgagaagacctcggaggccaaggatgcgaagaagagcgaaagcgtgtagttatattgtttgatttatcttggattgtacttgtcatatagatttcctttactttggccctcatttggttttcttcccttcggttctctcctgtgttatttatttcgtgttgatagaccatttgatccccgcctctcccttattatgttcctgtatactctattgactcccatatctctaatacaactacatccgtggataaatcaaccgtaacacttgaagtactctccggatttatatcattagtcaccgacattccaaattacctcggctacaaaccccatcttcccagtatacaacctggccacggagtactccgtccatatctcggtccaacaaacccatttgaaatgctctcacgaccacagcgcaaccttctccaaagacttcgtttcagccacgcttaccaaagcccaacccaaaaccagcccaaatcatccatgcactccaaccccaaccccaaccccgaaccccgagcatccaaaataatgccgcccctaaatccaacctcgcaggtatgtgtaacttgttctctgcagctacccgaaaggaccgcgtgtcctgtgggattccgaatctgaatctgctgtatccattttgccatgcgcccctacgatcatgtatccctgcgggtgttccccctgcttcttttccccctgagccacggggggtgtgtcttaaattgccatgtttcttttctttttttttcctgcgacgatcatacctggatgtgttattatccagggagcggttcggtctcggggctatgggcgtttgagtttcggcttccagtcttacgtgtgttgggacctgtttgaattaggcaggagatgagatgagatgagatgagatggaatattcttttctttgattgtctgagacaaggttcttcacggtccagccgagacttgaccgttcgatttctttttccccgtggatggacatcccgatgttaaacgcaaccacagtatagaaaggaggaaagaaggaatgctgatatttacttgcacatgtatcaggaggcaatcgccagacttcgaaattacatccctccgccaacaacgtactactcggtcccggtaagcagacgggcggcagtgctgctactgctcttcgccgacgccaagggcgatcttagggtggtggttacgatccgggctaagacactaagttcgtgtgagtgaccagaacttagaaaatacgtggatcagccctgttcccaggctgcatgacatgggttggttgttcgggactaggctaatgatattcgggtctacggagtagacgcgggagatgctgcattgccaggtggtaagtttgacagctccagactctgcaaggcaaaggcaaaagagaaaggaataaaaaaaagaataaattcctcgcttaaaataaactaaccccttcttcaccggagtaggccgagcagaaaatacagaatccgccttccaaacggcgcggcgcgaggcatgtgaggagatcggcctccccgacattcaggaaagggaaaagcttccacccccgttcagcgtggagcatctctgcgagttcccggcaaatcttgcccgaacggaggtggtggttcgtccctgcgttgcgctcctccacagttatgatgcgggcttggggctgaattctaatcctgaggtgtcacttattcctattctggacacgagagaggttgaggttgtttttacggcgccgttccaggactttctgcgcggacatggagagaatggggaggactggtatcgtgggtcttgggggatgtggcataattcgcaatggagaagtaagtggcctccccctatgttgatgtatgtgttgtgtctgttttgtgtgtgggattgccaagtggaggacgtcccaaataggaaatagcctggagactaactacgccactagtgcatcagttctttgttcccagagcagaccaagtctaccgtatctttggcatgactgcacgcattatcgtcgacgcagcccgggtcgcatacgcgcaggaaccggaattcgaacataacagtcattttggcgacgaggccatgatcgccgacctgcgccagttgggccggttaggtgaaaaggccaaagtttaggagaaggactgtgcagatagacatgccaataagaagtatataaataagacggccaatcagacgagggcgtaagcggatcaagggcgatcaagtccttgcgtcagttcgtttgacgatgtctgtttgttaataagattaggcgttaagggtctgttagttataagccctgatctctccttgcatcggatatcattcataacttcactcttcgtctttctttgttacacctacttatttccatttctttgatgcgtatttgattgttcgacattcgacatttccaaatgccaaccttgtacacccgaatggctccccccgttcgaccatctcgctcactcgaaggactcgagcgagtaatcccaccactgtcaccccaacctcccttctcaaatcgctccgatctcttcctcaacaaacccctccccgcaaaacccctggacccagaatgttcggcgatgtggagtgactccgacagcgacaccgaaagcaccctcgacagcatcaccagcgaaccccgccactccgcagacagctatcccatcggcatcttcgtcagttccggctccgactttgacgacttgggcgatcacccgcctccagccgatcagctcctgagactatccccacagcctccacataaacgcacggactcgatcgatatcaatatccccgagccgtcagtctcagtatcgtcttcgttttcgtcccagtacggacggccctcgaactggagccagaaccgcacgggcacgaatcactacttccgcgagaaaaagtgggattatttcccggaactcgcgccctccgctgtccaagcaagtggccgcatcagcccaaacatgaacaataaatcccgcaaaatcggaaacccgctggaattcgccaagggcaagtaccgctggcactcgctcgaccgcggcggtctcgtcggagtgcgtgactcgatcaagacgtacgtgcaccgcactctctcgcgcgactcgacagagaataaaccaaaggaaattacccgtccggcgacggcgcctatggaccaccatcttaatgatgtaggcggtgcgctcggtaacacaccgcagcaatctactttagctttggttttggacacgcaggccgcgctgcgagccccgtccgtcgcaacgtccagcagcagcgactacgactataccaaccacagattccatcttcagacaccgacctcgcctacttcgctttcatccccgacaacgccacggcagaaacagctcgccgtgccgctatccgcgtaccagaaacacgggcccgtgatctgggacgcgcccaagaagactaagaagcgcaatgttcagttcccgagatacaagtccccgcctggatccgtggcagagccttcttcgtcttcggctcccgatttgtcttactctaatgctacgctggcttcgcggaagtcgcagaacaatacccggggcgtgttcctgaaacgaattggggagtccaaggatgatcgcaggagggagcagttgaaggcgcagatcaagttggttgggcctgttaatccgcatacttatgtgcaggctgatccgtgggtttgattgtgtttcttgttttgtttttgttcttcagcactactctcatgacttctcacgacatctatacctatctataccctcttcacttatgtctttgttcttgtttttactgcatattctgtcttgttctgtggcttcagttgtaccttgttattattagattttctaaatatttccaaacaagtacttctagctcaacttggtgtaagccatgactcttggaaatcagtttcaatcataccattccacctcatttagatactcaactgcgtcgtaaactcaataatcaattaaacttctctgcacaacacctaatcacctctacagacgctagtttcttacatgcacatccataccgcacaggtgcatacagccaacaaaccaacgtagatcgccactgtcaggcaactccagtcatatttgagatacacccgccttgacaccactctactccgcacttagtcaaagccacgtctgccattatccttgtattatatattccaattggttcatctcagggcaagggttcctactgcctgcaatgcaatccaagaaattaaattaaatgaggggtaaaccagggcctgaactctcttaccaactcgcactgagatatttcctgagtgtaaccaaccctcgtgttggcaagcagttctccgcacaactagcggtgggtgtgtagatgagctgttcgttggggaatagccctatcattattattgtgcggaatgtggatgtccactatatcgggtgtcatcaccgacttttagaattgtaagttgctcggcctaattactctaaggggagttgggccggtctattgtagaaaccaattaatgagaataatactgaataatatccatgctgtaggacatgagatacgttgatcaaccccactttgcatttgggctaagcgttgggctggctatgtacttcgctacatgaagaaacgaaggatatgtgcgtatccgagctgtcgtcgggtcggtgatgggtcggaattcgacgaagatctagatgtcggatcggatgtgttgactttgtgttcatcttggcttggacaggtcgaccttctcaagttctatgttccaaggttaatatggtggcttactgtgggtatccttggaataataagatcgcacctatctcaattctagaagcgacttgtatctatcatgacgaggtcgctcatcccgatctgtattttggcctctgtggcggtatgctggtagaaagggccgctagcagagtctagagctatgagcattccatggtgacgatttgatatagtttagggctttgtggatggtcgctatcaggattaacagtcagcttctatacttcacggtatagaacttggataacctgaatatcaagttggttaacactgttctatcgcttgtataatcagatttccagaacaatggcttttttcagccgcaaactaatgtacaaactactttttcattgttattgcggtcactttcaacaggacgtcaagactagaagacagaggataatcatggaagtaattcaatgtgccatctcttgtatccatattctagtccggagtcagacaaactataccacagcgactcattcatccaacatacaaagggttttacaccaattacaatcaactgatgactgcacatagactcaagatctccacttgaggcaacaatgagatccctccaagcggagtcgccgctgacctaaggtgcggccccgttttcttctagtatacgtggacctcatacacggcgacctagtatacggcgacctaatatacagcgacctagtatacgcggaccaacctgggtatataagtcggagacttccccacgtcagacgatctttctaccaacctacaccgctgcagtcatccctgactgcagtcaatgtcagacatggtgacatgtcctgaccatggaaaggacctgtgaaggtctcttcatgtggaatctcaggcattgcctggacttgggcttgttctttttgatgtgcctttcccggtaagtgaaatatgctttgttctctcttgttgtgtcagtcgctaatatgtatatgggtaggccactgagaattttggtcgctcgtctcaagggcgatattgatgagtcctttgaaatgacggggcagatgaagagcgtcctgaccatggaaaggacctgtgaaaaggtctattcatgtggaatctcaggcattgcctgaacttggccttgctctctttgatgtgctttcccggtatgcactatgctttttctctcttgttgtgtcagtcgctaataggtatacgggtaggtcacctttgagattttttggatgctcatccaaagggtgatatcgacgagcagttcgcaacgatggggcagatgatgagtgtcctgaccctcggaaatgacctgtaaaggtctactcatgaggaatctctggcatggtgccctggttttgcgtgttttgtttttgatgtgccttgcctggtacgtgaactatactttctctcttgatgtgtgtgtcgctaatgggtatacgggcaggtcctttctaagagccatttaacactctcccaaagggtgatatcacccagagcattttgccatgacggagcctgtgctggaacaatttcaggcaccggcttaatgatcgagtgactgtctaaagctcatcaaatccgtgcactcggatacaatgagaacctcgggcagactggtttgatgtcgtcgaaaagataaagcatctatcgacatagaaaacgacggatgagacctcttggtcagtggtggagcatgtgggtcgatgagcgtgagtaactcgagatacacttgtcaggtcgtggaaagatccctatactaaccaaaagtctagtccgcaatgcgagcttctcgtgcgtttccctgcaagggacgctcaagaaggtcccggtcgattgtgttggagtttatcaagctgccgcaaggccttcgcttgctcttctgccctacagaagatttcttgtcttggattcgaaatgtctccaagaccaaaggcaaaggcaagatggccggggggggggagaacggagggcgttgatagggtgggggttggnnnnnnnnnnnnnnnnnnnnnnnnnnnnnnnnnnnnnnnnnnnnnnnnnnnnnnnnnnnnnnnnnnnnnnnnnnnnnnnnnnnnnnnnnnnnnnnnnnnnnnnnnnnnnnnnnnnnnnnnnnnnnnnnnnnnnnnnnnnnnnnnnnnnnnnnnnnnnnnnnnnnnnnnnnnnnnnnnnnnnnnnnnnnnnnnnnnnngttgatatggtcggggttgggggggttgaatcggccgatgcggccgtggctgccgacgtcttccattgccccgaccccggccctagcaactcaagagaaggatcttttggaagtggaattttgagctatgtttcttgttgcaatcaccgactgagaactggcccatgtcggtggcctggttcctttttctcgcgcgggccatgagcctgctgctcgtgtacctgaaacatggtatgaggtgctgaattcctggggaagcgttgatagagggaggtgtgtctcccatctcataatctcaatacggagagttcccacggggaggcatcacttcggaaaaatcacaagttccttgatatcaaagcaatcaaagcaatcaaagcaatcaaagcacattgaaagccgtcctaagacaacaattggaacgtcaagtatagaccgaattccgctcttcaagcctaggttaaagtctttgctcatttcttctttctatctgataccccaggaagagagagagctgtgtcaggtcgcattggagagatgtcagtttggcggaagtcgagcaccatcaattccgatagctaggagagataaatcacgggcacagcgcaagaactcgactaagatgccttgagaataaagaagtagatgttgtactccgtgttgtatagttgacgatcgaatgccaaggaaacatcagagccccgccattcaccgaagattcaccttcggagtatggacaccttcggggtatggactcttgtcatgactcattgctccgatctgcttcaagtctgagttctttcgttacctttgtgcgcttcgtttactgcactctagactcctactcctctcggcatcatggcgcaagaatcctcgcaagtcgcgccccgctacctgaccggcgataaggccggcctccaggaattcctagccagattcgatgtgagcacacgttttggatctaccgatgtactagagagtcctgttactaaccagattctgtacaggtattcctcttcgactgtgatggtctgtcccctctgtatcggccgaagctccccgcagcgctgaacgcgtcgcaacaaccgctgagacaataatatttaggcgtcttatggtccggcgaccacctcttccccggaacagtagagacactggagcttctccgaaagaatggtgcgcattaaataccaagtgcgcaaacagaggttaataatccccagggaagcaaatcgttttcgtgacgaataacagcaccaagtcgcgcgcagactaccgcaagaaactcgaaggcttagggatccctagtacagtggtcagtgataccaccgattaatcacctcacccagtggcagcgactcacaaccaaacaggaagagatcttctcctcctcatacagcgcctctatatacatttcgcgcatcctccaactccccgaaaacaagcgcaaagtctacgtgatcggcgagacaggcatcgagcaagagctccgctccgagaatgtccctttcatcggcggcacagaccctgcctaccgccgcgacgtcacgtcagaggactacaacaagatcgcggcgggcgatgagtccgtcctagacccggaggttggtgtcgtgcttgtcggtctcgacttccacgtgaattacctcaagatcgcgctggcataccactacatcaagcgcggagcgatcttcctcgccacgaacgtcgactccacccttccgcactcggggtcttttttccctggcgctggctccatgagcgcgccgctgataatgatgctgaatcaggaaccggtcgctctcggaaaacccagtcaggctatgatggattccatcgagggtaagttcaagtttgatcgtagccggacttgcatggttggtgaccgtgtgaataccgatattcgctttggacttgagggtaaacttggcggtacgctgggtgtcttgactggtgtctcttctgaggaggagttcgtgtctggggatgtcaggcctcatgcttacttggatgcgctttctgatctactagcctcggagggggcctgaaagatttgtattataacaaatgttgtatttagagatagacatacgaacacaatgattcacccatagaatatctgtagccagggctatcctatcgagtttcgcttcttccatgacaaaatgtcttcatacgggtatgtgtactacaagtaataccaaacaagtcccctcgtagatcggaaatatcaatttaccctcggcaattctccccactcaatgatgtccagttccacagctccggggcgatggacctcgggagttatattcaggcattggaagccctaattagttcactaagagctttccaaagttgataattaactataactaccagcttattaaaaaggataaggaagtcccctaaatccaaaggtcgggtttattctacaattcgataaagtccaggtctctgttcatgcgcctttcagggcttaattgttgcttccatctcgcatcctatacctccagccttcggtgaccggcaaaaataaccctatcggatggcctactgcatagagatgtcaccatccctatcgggaagagcgctagctagtgcagtaacaaggattccctgtatcggtttagctgtgatgtaagagattctcctagaatcaatactcacgatgtcgatctgttcaagaaggttcattgggtcgatagtatggtccttaagggtagtgtcagtaatgaatcaaaatagttcagctgggggatcttgtacgcggcagagtgtctcgacggcggatttccaaagagcgaatagtggacaacgccgctgaaggtgtctggggtcgtggcagaggtaacaggccggtgtgatggcgatgctgctctgtgacatactctttatttgttagttgttggtctaaaagggtttgttctcagactggttatagatatgagagtggcatggtggagtatgacttacctggtgctggtgttggccttggtgttgatactgttgttgtaggtttcggtgatactgttgtctatcgtcatgaccagctccttgggtagctctaccagcacgattggggtcacgactagctccctggcgttgtctgacagggcgtgtagagtccatatcaagatgagcgagaatataagtcttgaagtcgcagaatatgttgaggatcaagacttgggaatttcagattcttgaccaaagatgagagttggtaggagatacgaagtagaacggcaagctccttcatggttggttaagcagagtaagagggagttgagctcctctcccctaaccgcctcctatgcttctcctacctcctttttgtttgacgcctgtatttggatcttgctttattgctggtaaaacgaaagaaaggtctgggataaggctacaatcgttgtttgatttaggggactttacttcacgctatttccaagtctatattgttatttactggcgccagctcatcgacgtcctagtcttcagtcaaatcattgaatcagaagcgtgtctaccccctattcaccagaaaagctcaagacgcagtcatgtacatgattactagctatgcgtgtgcataaattactcgtcaagtagttcagactcactcggtacttagtagttcacagaaaagcaccgtgaaagggtatcatgatcattccattcgaacaagatctgagtgctaaaaaaccgaatataacgcctcaaacatgtaggcgtccttgtcctgaacgccttttttccgatcaaatattcggagtctcactgctgaccataagggtcaagggttggggaaaccgcctctagtttccacgcagaactccagcgatgcgtaatgctaggtccaacatggagagatgctcgtcggatccatcaaccagtcgcttgtcgacctctgagaagagcatgacaatcttgtttttctgaatatcgggaattgcctcgttgaacactacacggcggtataactagaaaggtcagcaaaggtatggggaacacccaggaagaagacaaacctgtccaaccagctgcgtagcactccagccatcagccacaatatccgtaatcacccccgagacagcctcgtaggccgacgcaccactcgtaggctgcatagcctcgacaagagaatccaaaacatcatccggcagcaccccggcgatttcctcaatgctgttaaccgtaataacactagaattactacccacatccgtcatctccgcatcatcatcggcatccttcacagcaggcggcttcgtaggaccgaccaagcgcgccgcgctctgcagatacgtgatggcacgacgcaaatcaccctcgccacaccggataagcgtatcaacaactccatcctcaagctgcaagccctcctgctctgcgatattcgagatccgctcaccagcagcgctattatccagcatcttgaaccggaacttgctgcaacgactggcgagcggctcgatgatgcgcgtgacgtagttgcagacaagacagaaacgtgtgatccgactgtatgtctccatcgtgcggcgcaaagcggactgtgcgtcttgcgtcatgctgtctgcctcgtcgaggatgatgatcttgaatggtggacatgggtactgtgcgcggtaggcggcgtccaggcctgttggttgggagagctgggctcgcgcgaaattcttcactttgtcgcggacgatgccgataccgcgctcgtcggaggcgttgagttcgaggattcgggagcggtaaagggcgggcccgaagagggatttggcgagggcgaggattgtggatgtttttcctgtgccggggggtccgtagaagagcatatgggggagctgcgagtgttattttattgcttcaattgttcggggcgggtggtttacgtttgaagcttgcagagtgcgccgcaagactttggtcgtgtggtcttgcgcagcaacatcatccagggtcttggggcgactaattgatattagccaatgctgggtaagctggaatagagcattgacttactatttctcaacccacggctggagtttagttgagtcttccttgttgtcgccagccttgagcttagagctgctggatgctgcggcggcagcggcacgagccttattattgaaaaaagaggcagccattgttgttgaatagccgaaattaacaaggcaggttatctcgagagctgctctgcgatgtgttggagtctttctgacgccctccacaatcaagacgcgtctccacgtgacacgcgcagcacttaaacactagccaatgagagcagctcactgtctgagtatacttcaacctatcgccagcgttaatgctggtcttatagactacggggatcaacattgcgagggtcatgattgcatggtatctcattaatgcttgtatcaatatttatagcttatagctcgtctcgcaccggctcctccatcccagcctcgaacatcctcttttttgtattccggggaagctttgcttgtcttgccctctcctccggggtgacgtcgtcaatgtctacgcttttttgtctctcttgctcgaccatatcgccaattttatcaattacacgattgctgtcgatgggtgcggtcggctcttgctcccaggcggtgctactggctgtcacggttcctgttgtagccgccgtggccatttgatggatagccgtagagacgtcccttgagatggattgagaagcagactgcacagctgtagtggatagcccggctgcacctgttgcaaacgcaagccgagcaaagagcttcaaaggctgccatacgagccaccaaagaggcccataaaagacacgtcggaataggagccagccaattgtcgcaagaaggatatagaaagcagtctcaaggtaccatgtgtcggacttttgggaacggagaagagagttcgctagactgcgagttgaagagagaagtgtatcaaggctgctataggactcagacagagaggagatcgcggctgtggattgttctgattaagaatattagcgtctggtaggataaggaaatggatagatgtacttaccaagagttgattgggcaaaatggctacgggagagctccgcctgcatgagttgatgggttctgcgtagcgcagatgtcacatcgttcgaggcgttcaaaacaagatcatcctgggtgaacttctctgacggcttcttcttttcggaagagtacgatctcgacagcagcaaatctctctccttccgcctggcgagttcggcattccgcttcgcttgtaattgggcggttcggaaatcacctcgtgttctgaagggccgattagcacatgctacatatttcaagactagccagtggactatgacaaggaatctcgccggcatgcgcagtcgttgaagggtatcttacctcatgagatcctcagccaatcgccctgccatagaaacaacccgctctttctcaacctccttctgtccatgcacagcagatgacttgcgcctgctatctgagccagtttccagcgcttcaacctccacacgcagcagctccaactcttgttcggcttccttcagccgggaatgtatctcacccccaagctccagacgtgcttcatctccctgtccaatagaagcagtaaaatcgcgcagtcgatccacgaggggctggatttgtcctagggaagccgagagctctttcacgcggccctggagagctgtcgtggaggacatgttgttatagacgcatccaagtgctgtttgttcggggagtagaaggggtgtctctgaaaatagacacaagtgtagaataaaccgagagattcaaaacaataagttgcttcataagtgtcgagttgttcaactcaagagttgccagcgtcattaggcgttgtgtttgcatccgagtcaaacatgccccatttcctccaaccgcaattcgcaacggcctccgatgtggtgagaacttccaattgaccttgcgccattacctatcagacttgtcgcagaccgactagggtccaagcaattttctccttggatcaatcttccaccgagggtcatttgtccaactgctgcgtaatctactgcagaaacaccacctttaaaaaacttcccgccaaccctcatccactcaggtacgcaacaacggaaccaagacggagctataggatatcattcgctcttgaaagattcaaactgatcaatttaccagtccacaaaagtctctctcccactcaccactcaaccgcaacaatgggcatccccatcgccacgataaccaccttccggaccgcctacaaccccttctcccgcgctgcccggccatgccgcctcttcctaggcatgctgcgcacaccagacactatcccaaccagcagcccgacgcacattgatatcaaggtcaagcaattgccgcgcaactccaccgagtcaccgaccatgactatcgggttcaagggcggcaaggaacttacgctggatgtcggaaagcgcgggctgaagattggcgatgttattgaggaggtgtctcgtgttggccgagctctgcagcgtgaggccagcttgaagaactaagagattttgttgttcgagcttgtattcgtgtattatattacctatcattttcatctaacgattttggcgctgttggcgctgttgggcatgtggaatacttgaattattgttggtaaaaaccataagatgttcatgcttctacctgatactaggattactggagtggatttgatcttgcacaaactgatcctgaaagtgattgtttcattgctatccagttgaatttgcatttgcccagagattactcttctctacactgtagtaagaatttgaatactgagagcgattcattgacagttcagaaatgggtcttttcctcggaaaatcgaagaatgcacttcccatcaggcgtaagatcataggcttggaagttttgtgttagttttataggtctctttcagagaatatcatttatactgcggcacctgagatgaagaaccacttgtcaatgcttccatcaatgggagcaggggggaggttctcgttgcgggggatggcagcgagctgggcctggtcaacacggtcgggagagttctcgacggtggtgttggcactgtgcaggttagcttcaaatcctcaaaataggatacatgcatgtagaactcacaggctgatatcgccacggggggtcttgccagtgacaagcttctcccaggcatcggagcactcgcggatgacatcctcggcgtacttcttgttcttgcactcgccggagaaggcgaactggttctcgggctttccgtcggggatcttgtaaatgcggaaccactcgttggtggcgcgcatgagaccaggaagctggcgctcgacatcctcgatgtcgttgagcttgggagcaagagggtcgttgacgtcgatgacaatgatcttccagtcggtctcctcctcgtcaatcagggccatgacgccgagaaccttgacctgcttgacctggccggtgtagccgacaagctcaccaatctcgcaaacgtcgaggggatcgttgtcacccttggccttggtctcggggtggatggagttggggtcctcccaagtctggtagataacgtcagttttctgcccctcttcttacccacgggtgtgggaggaaggttcgaagcttacgcgagggaaggcaccgtagttccagaggtaacccttgtgagggaagcagttgcggacgaagcggagcttgcccttcttggtgtcctgcttgatggggttgaggaaatcatccttggagatctgtgttgatgcgatcagtataaagctgaggtcaattgcgggactgtgtgtcgtacctcctgcttggcgttggtccagcgggggatctcaacgaccatgttcaggatggtttgctgctcgttggcgtagagaggaatgtcgtggaagggagaaacagggacgccatccttctcaacgaacacgcggtgctcgagagtgtatggggtaccgatcttgcggatggagtaagtcatgttgggcgaggtagacgaaatgtgtcgagatacttgtgccacacgggataagggagaagaaaaggaagaggaagagagaggggcagcagaagtggggggagccagcgctgctgatgtgcgccaaacacggcgggaggcggtggaggtggcacttcccagtcgggccaagggaggacaagtcattggctgtgttggaaagctctggatgccgtgtttgtttgatttagtatttcagatacagaacttgaaattgaatgttataatctcaatcaaagggtatagctgcaatgcgtggcggtgttaccccttgtcggaggtttgtatggggaaaaattaaacatggcagttccgaaactcggcttcttgtggtcaccccgactttgatatcccgactggaccaggccaatgtggatgtctattgtatacaattgactctatgcggtgagacgtacatagcatacatgtacgctatatcttttagctatttgacagatgtatgttgtacaccgcatgtacatacccgaccccatactatgacgccgatatcggcagtatacgtacgcctatgttgtctagatcaatcgcttattcagtccaattgtattccttcaactgtagaatattaacaatagaggcatcttgggatcacaaccttggaagtcatgtcgtgatccttggctgggaacagagcccaatgattggctgctttagctcagcttgaaaaataccagaataaagtaaattacatcaatacgtgaaatccaatgacaaccctcatttaaaaaacagttatcgccactatcttcacgtgactcgagctttccatcgcgagtcaccccaggaaaaaaaaaagccgctccccgcacacagcatatgggaatgctatgatcagaattttacgcaaaacaatgacaactctcgcaaccgcagctacaaccgcccccgcgtcggccgttgtgccgcgcgtgtccatccctaccaacggcgtcgactaccgcaacaaaatcgtcctcgctccaatggtccgctcaggcgaactaccctcacgcctcctagcattgaaatacggcgccgacctcgtctggggcccggaaacaatcgaccgcgcgatgattggcgccgagcgacgtgtgaacccacgaaacggcaccatcgaattcacccgcatgcccagcaacggcggccgccctaacaaatcactcaaagaatcagtcatctaccgcattgacccggcgcgcgaaaagggacgactagtctaccaaatcggcacggccagcccggagctagcagtgcaggcggcgcgcgtcgtggccgccgacgtctcaggcatcgacgtcaactccggctgcccgaaacccttctccacgagcggcggcatgggcgccgccctcctccgcaccccagacctgctcgtctcgatcctggaggccctcgtcaaggaagtcgggacacccttccaaatcggcatctcggtcaagatccgcatcctctccaagcccgaagaaacagaagccctcgtctcgcgcctcgtcaaaacaggcatcacgggcttgacggtgcactgtcgcacgactcccatgcggccgcgcgaacgcgcaatccgtgaccaactccccatggtagcgaggatctgccacgacgccggtgtggcgtgcgtgatgaacggcgacgtgacgtcgcgcgaccagggcctcgcgctgatggccgagtacggcgttgacggtgcgatgatcgcgacctccgcggagaccaacgcctcttgtttccggactaacgaggatggcggcgtcgcgccgtggcgggacgttgtctacgagtacatgcgcttctgtatggagtcggagaatcggctgggaaataccaagtacttgcttaacatgctgattcccggaaaagacaaagagttcaaggatgcgaaactgtcaaagacgtatcttgatatctgccgcgcgttgaaattcgaggatttgcttcctgctgctatgcgtgttgatgagctactcggtctcgatgagaaatgggaggctgcccccgatacagaatcccaggcggagcctaaatcaaaggctgtgcagaatgccaaggtgtcggaggctgctcgtgcagctggcggcggtgctgttcggactaagacgccctcgccggctgttcatgcgggtggtcctatccggcggtcttctgctcctcagccagctaaggttgttcaggttgatgcagagcagccagctgttgaggctgctattaccgctgcacagactcaggctccgtctcaggtgacggcgtaaatgatgcttgcgttttctgtccattgtcacttctcttcacatcttgtcttcggtcccatgcatagccttcggttttctctcagttcattcttccttttatcttgcttttatctgcattctgaggtgtttatgattgctttcatctgttctctctatagattattccccacttatatacaccatgctccttgatgactatctagtccttattacaatacatatcactctacgcttaacagagcttataacatcgtgtactaaatcaatggtagttggattcgatcctctaatctaacaaatgatcccccccaaacaccagtattatgcattctctgcatcgccatgcagatactcacaatagaaactccagtgtaccctttttttgttttttttgttttttgttttcttgttttctcttctctttgcgctcgctcacttctctgcagctgccgctgcttccgccgctgcctccgcctccagctcggcaatcatcatttcctcgacggccttcatgccgacctcctcactcttcttggccccggcctcgtcatctccagccacggcctggtcaagtgccagcttggtctggcccagtgcgtggatctgctcctcgatggtgctcttggtcaccagacggtagatctcgacctcgcgggtctggcccacgcggtgcgcacggttctcagcctgcacatcttcctgtgggttgaaggaagaatcgaagatgaccacgcggttggcacaggccaagttgataccggcaccaccagccttggtggacaggaggaagacggggatctcggtgcgctcgtggaaggcgtcgaggatggactggcggtcctccacgttggtgcggccatccaggcggacgaactcgattttcagggtttccaggacgtgctcgaggatgtccatcaccatcgtgaattgagagaagatgagggtgcgatcgccattggcgatgaaacgggtgagaagctctttgaggtgctccaccttaccggagtccatccattcatcgttcttgagcttgaacttgccgagggaattggggttctccacacacatgtggtggcactcgaagtcgttgtatggcatgagctcctcgtagatgatgttagggtcggatagcgaccacttgtcttccttcaggcaggccttggccatcttctgtagaatctcgttggtgtagtgacgacgagcaagaagggggtgaatagcggcctggcgcagcttcatgagaatgttggcggacttcgacccagtcttctttccagcaagacggtctgccacgagctggcgcacttctgccttttcgtgatcgtaaatcttgacctgagaaggtttcatttggcaccaaccaacatgggagtgcttggctggaagatcaatgacctggtgcttctttcgtcggaggataaagggcttcatcatggactttgcgcgctcaatgcgctgctgggataggagagtagcgtgggactcgtcggtggtcttggccttgttggaaaagactgcatgaaggtcatccttgtgctcgcggaagaccgagggaagaataaagccgagaagagatgccagctcctgcaagttattctggagaggagtaccagtgagaagcagacggaaacgtgcccgaattcgaatcaacttttcgtacagctgagattgatggttcttcagcatgtgaccttcatcgtagacacagacagtgaaatccatatcacgtaagaacttagcatcaagctttgccttggcaatggtgtaggtagtgatcacaacgttgatctcgtcacgtcgttcctcgatctcctcgcggatgagagcacgctcattgagaccggcgtagtaaggcatgacgttcaagaccggacagaatttctggaactcgcgaagccaattctcaatggtggaagatggaacaacaatcaggtgagggcccttaatgcccttctcatacagatgcgcgaggaatccaatgacctggcaggtcttacccaggcccatgtcatcagccaggatgcagctgaggttcttttcaaacaacaatgccagccagttgacccccaccacttggtaatccttcatcaccaggtcgtcggccatgatagaaggctgtgagataaaacgagatttgcgctttgaaacgaccagtttgccgctttcttcgtcactttcggaggattgacgttcagttgtaggagttgcaataccagagtcatgttctgatttggcaggagcaaggttggtaatttccaagtcgccctttttcccgaaggtgtcgacaccccatttcttcatctcttcggcgactggtttgccgagctcctcaacctcgccaacaagagcgtcaatggccagatatccagtccacatatcaatacacttgtcgacaatcttgtctccgatgggcttaggggccttgcctcctctcttgcccttgggcttcacggtttgtgcgactggagcagagacaacacgaacttcatcgagagtctcgtatggacggttcgaaatgatgatttctgcggttgcttcggggatagaggcgatatcagcgagatcctgaacacgacatgtgttgaagaatttcaggaccttggaatccaaaccgccagcggtggattcttggacctgaacgtttgaatcatccgaatcactcatcatagcctcgggggactcggatcggtcgggggaaggagctttgcggcccttctgaaggcgtcccaacttctttttcgggggactgtcatccttgattgtgatagcacgggaaggagaaatagcacgggaaccatcagacttgggtccacgaacgagtcggcgacgaggctttccttcgtcatcggattcctgacccttgggctgcttcattgctgcccacttgtcctggatggtgccacgggctttgatgttctgcttggccatgggaacggggcctgtagcgggagaggcactcaattcatcatcggaggatgcaatcaccacaggaccattttcagaatccattttggcaaggatctggagcgcgccgtcgtagtttccctttgctttcaacatcgcatccatacaggctagaacagtcatatgcggcataactttgagaatacgctcaactttaacacggagtctgaagtcgttgatttcgtgaagggggatgtctggaactcctgaaggtggcgcgcgagagggcgcatcctggcgggctttcttcgtggcaactcccttgggtgccggcggactcatctgatctgcagtccgcttggtggcggttccagcgttttttggatcgtacatggcagaggcagtaatttctcggaatcgatccattgacccagcatcagggcgcacgggcgactccatgatcttttctttttcagaatcccgagggggcttcgcaaacatggacggttttatgtcgggactttgtagatgacactcttcgtctgaagagccacctcgatatgttgggccgtcgtcgagatcaaaccgcggtgttcgtttggtaggaccagaggcaggagggcgaaattgcgtcccagaaggagcgatcaaggatgagagtagaccgccttggactcggcggggaggagaaaaggcagggcctagcggtgaagatgcagcaacttgaatgacagtattgttatgtcttgagtagggatgttcaagtagttgtgttggttgggtcaatctttgcgatggagttgtcgctgggagagttgcgatagtttcgtagtcttcgccgggaggggtactcgggatggtttttatatctcgagggggggtactattgatagcttcttccattgctctcaatacaacaatgtcattgaatcatcgactcatctaattgttcagcgctattcaggaacgttttttctgccaaagcggacacgcgccaccggacgcgcccaatcacgtgtgagagccgtcaattaagctgtgaatgagaacaaagaggtgagacatcttgagcagttaagccacatagagacgactaaatcagactcagttctcaacttgaatgaacaatgaaccgcagggaacagaatcggaatgagacaatgagacaataaggagtcacatggcatatacctcaacccaccaatcaaatgccatatgacggcgggcactaaccttctctccgcacttgcgatagcttcagctcctttgtctctctgaccttccctttttcatctttgcctttgactcacttggatattgttgctctcaagaaacaaggatgtcttcccgacgccccgacaaccagtcctacgccgatgttgcggcgaagcctgaaccgcaaggcacttccgacgtggccccagctgttcctgcgtaagataatgaccttagaagcttagattgattcttgaagacatattcttattagctctggtatttagagatgtgatctacaagctcctcggctttacagctgccatgatcgttggccctattggcatgtatttcttgactgtgaattcaatcttcagtggtgagtatttctgcttccgacttgcaatggcatatgctgattgaatcgatgttattcagggagctcgacacttgctggaatcaccgccgccgttaccgccaacgcggtcctgttcgcatatatctatgtcgcctggacggaagaccaggaggatagacaagcagccagcaagccagattcaaagaaagcccagtaggttggataaaccggatctgaagaaaatcattacttttcggcgttacggcattgttcaggtggttggggtttctgttatgtataattgggatggaacaacttcggccatctaaggactcaattgtaaaactatacattgactgagctattcattttactgttatatatcccggatatcccaagataccaagccccatacttcgatgtcaagccattaaaaagcgctgttcatgttgaaagaaccgcatctagagacgagaaagacctcgacccatgctccagtatagacagatacgccgatatgcattgcaacagaaatcactcccacatattcccattctcggctccacatccgcttaggtaggtctgcgcttgacaaactcctccaagtccgccttggtagcaacacccagcacaaacttgcgcgcctcatcagtgaccacagcaaactgctgcttctcgcgcttctcgccattcggccccgtctcgctctcgaagaagttctcgagctcctcgagcggcgtgttcatcgtgatgacctggtagagaccgcgtttgcggttgaaccgctgcattgccgcggagacggggtcgctttctttcacggtgccgctctgcagtagctcacgtagccgtgggatgctgaggtagcctagcagggagcgctttgtcggggagataacggtgaggtgcgtgtagtcgcgctcgtaggcggccattagggctgtggagattgggtcttcggaggagattgagagcgccgcgggagggtcgaggtcttcgattgttgcctgttttttgttagtttgggccagatggttggattgggggagacggacaccgcggtacttgtcggcccaggctgctgtagatgtatttgtgtcggagggggtttgcttctcgcgagtgaaggcctcgctggcggtcgagtatgaagccattttgagtttgatcgggatgaggggttggtgaggggcagtggataagttggagagttggagggttgttaagaagaagtacaggtagctggaaagtggagaataattgtccaggtgtaaatattgagaagtcaagtcagggttctcagtaggtatacctaaatcgtgcaggtcaagagcttgcaaccttggggatgactttttgatgtcaagcttggcattaactccactacggaagacgcttgcggccacggaggctatcagatctatatttctattttctctctgcttgcttttaattgcaaagttagccctagagtgtacttcgatgatcagaagggcataaagaaaagtaggaaattacggactaaagacggcctctggtcggtataacatcacccactatatatgaagtatgtccagaccataggcaattaaacatagcatcaggaaatgttataatagatgccccgatctagaatgatagaatctactttgcggaatatattcccataagtatatatacaaacggggttctctcttggcctaggattgtaatcctggccaggggcatggcatgtatacatgttgtagcatgtcaaaaggcacagactacacggagatagctataagtacattcaacctcagatagctgttatttaaagcgtaagaattaatttccccagagtacatatcaagactgaagtcatactcctcacaagtccggagtaccccgtatccttgtaccccgctagcgccacttacaacctccgcacgtcattgtcttgggatcttgatttcccacctcatctcaattatattcaaaatctcatacagattcaacaggaagaaacacatcagtacactcaaaacccaccctttggtggagatcaccggatatcaagccgactccacttatacccactacccgaagtacaccatgcttccggactggatcaacgctttcgccgcccagcatcctctgggtgccgtgagcgatgcgaagtccgcgaaaaatagaccgtttacagcttggagtgcactcgacgacgtgaagaccaaggccgacggcattgccaacgaggcgagccgggaattcaatgtcgcaagccagaaggctcagcagaagaccggcaagatccagcctggctctctgaagtactatgtagcgtgcacatttggtggaatgatggcatgtgtcagtagcttctctgtctgaattatgatcgccagatactcacgcatatcagggccttacccacactgccgtgacacccctcgacctgattaaatgtcgccgccaggtcgatcccaagctctataagagcaacctacaagcgttccacactatacgtgcggctgaaggtattcgcggtgtctttacgggctggagccctacgttcttcggctacagtgtaagcctggataacctgtgggtcttttaccttaattatctatactgatggtatacaggcccaaggagctttcaagtatggaggatacgagtacttcaaggtgttctacagcgacctggtcggccaggagaacgcgaaccggtttaagactgccatctacctgacagccagtgcctcggcagagttcatcgcagatctagcgctgtgtccgttcgagtctgtcaaggtgcgtggtcagactaccattccgcctgagattacaggtactttcagtggtatctcgagtgttgttgccaaggagggcgttgctgggtgagttgacatatatccttttgttctggatcgaatctatatactgaccctaccagtctgtacaaaggtctttacccgctgtggggccgtcaagtcccctacacgatgatgaagtttgcttccttcgagacgatcgttgagatgatctatcacaatctgccaggccagaagtccgactacaacaagggtgcacagactgccgttgcattcaccggcggttacctcgctggtattctgtgtgctgcggtatcgcaccctgcggatgtcatggtcagcaagttgaacgcgaatcgactggcgggtgaggcattcggcgctgctatgagccgtatctatggtgatattggcttccggggattgtggaacggactgcctgttcgtattgtaatgattggtactttggtgagttgttcatgttcagtgtggtcaagctggtgctaatatattcgtatagaccggactccaatggatgatgtatggtctcgctttctttcgtttgtgtggatatatactgaccctgattctacagctacgattcattcaagattttcatgggacttcctaccaccggtggctcaagtgaagacaaaaagaagtaaggtgtctggtttgattcgggtagtggtatgcacagctcctttatcctttaccatctcggcggctcctgcgatattctatcaagtaatacatactctctctagttatcatcgtaatataaagtaaccgccaagctcgctatcggccaattacagtttgtcagtggccgcctctaccaatcggaggccgatatcttatcgtccctgcagttgtcgaatataaaatgtcaatgtcgttgaataacatccgaatgacatccaacttagataactagacaagcgaaataggggacctcgggaaccgcttggctcatttcacgacgaaccacctctattggctgcgaatccctgtattatctacccgatagctaccatccaggtggattatacttaaaaagatctagatccccccgaaatccacttctctacattccccgtacgacttaagaaacagtaagttcacgtggatttccccgccatcgcatctgtacctgcatgtatcgccccatcgataaatatcttccctgccccaccattcttcctttcgcatctaccaccccgcctctacttgcaacgacacatctacgaacctgaacatctatctctgacagaaactagacaagatgcccgataagacagaggccgaggcatccacatccgacgcaccgatcgtctctcacggccgaggaggcaagcacccaagtctatgcgtcatcgcgcccaccaactaacaagctcgaatattaggtcaaggcaacatcggcaaggataacactgagtatgtcccatcgcagtcgcagtcgcaacaagcgacaaatactaaatatcgaatagatacgtcgatggcgagatcgtccgcgaaggaaactacggcgaccaaggtgatggcgcttactctgccggcgtgagtacttacctacctaccttcctacctacctacctacatctatactttgaacacccaaatccatcttttagcgatgtccatactgatacaactccagcgaggcggcgctggaaatatcggctccccgatgatgcgccccacgtccaaggttccccacgacaccgagatgatccccgagcttgcggtccgccactccacagacgaaactttccatatcggggtaagcagagagttgtttgctttgctttgcgtttgatttgatttatgattgattatcccgggcttatggtttccctttccgaatgcggttgtttttactttctttttttcccttcctgcttttggatttcaggctgactttttcgtagcgtggtggacagggaaatgttcattccgaggatgcgacgaagggcaagaagaaggttgccaatgagggattggcggataagttgaagaataagttgctaggacggaagtagggtagggccttttcatcttgtgcttcttttgtgattcccaattctcgcggtatcaattaatttccgggttcattccggatttactctttctctaccatgttatatgtagataccaatctcgaacagtaagattgacggatatcatgggagatagctatgtggagtagatacagatcaatatgaataagaaattaaaaacgaaaacaaaataatcaaagaaacaaaataagtgccaaatccatgacgtgtcccatgtgtccatgcatcataacctcattagagcatgcgatgaaagaagtgaagaagcaaaaaaaagaagtaataaacacaacccacatccataaacaaatagaaacgccagtctgcagattcccaaacaaaaggagaaaagaaaatgaagtgtccagatatatcaatctcacatggacattctttatttatccttgctgaaccggcgtttgaaccagctctttcttttatccgctttctcacccttcttgctgacagtcgattgtgtggtggagatcgggacacctccaacgggtccgcccatggtcgggtcgcggatgggctggacagggggtgccttggagttgaacccgttgaacccgtactcggcttgggaccgctcgtccagacgctgttgctgcagagcctgctgctgcaattggtcgttggagctgttgatcgagctggggtcggtggactggccgtagtctgtggtgccggaattgttcgacatggccgcgatgttgtcgcgcgaccgttggtagccgtattgcgagccggcgatgttggggtagccctcggaggggctgatgggcgacgagggtgacccgcggggatggtgcgagggacgtcttctgccgttttggctatatccgttctgattatatccctggttataggggacagaaccctcgggtgagagaggcgtgttttggtacgcgttcacgatgctgtctggtcgcgattggccgtagtagctgttggatggaccatttggacctgggaaggttagaagggatcgaagatgggattgaagatgggagagatagcatacttccgtagtagctggtccgtcggctgaagtcgcccatttgtgacgcatcctctatcgaataatcagcctacattcattgtgactttccacagtgccaatacctgttctagcatatgacgcacggttattgatacttgtgccgtagatagcagcctcaaacgatcgaatggtatccaaggggcgttccagacgcggccgagtgggatttgacaggtcgggatcggctgaacgaagtaaggagttaggagacagtcccagggaggaaagattgccagtgatacggactgataacattgccatattgatccttgaattcaagctcgcgcagtgagcccagattggacttttgcaaggccacggccactattgtggtgtcagttgaagtaaaatgggacatgggaaatgcgaggtgcgaggtgcgaggtgcgaggaaatgcgaccgggccaacaaggtggtaaacatactaggctgaagctcgttcatggcgataagtggatctgctttggtatgtagattgcgacgagatttctcttctgaagactccgagggaccacgtttatggcttgttgatccggacttgtctgacttgtcggatttcacactgaacccacgactcctctggggagtgggagattggggggagtccattttattaggggcagttcggtctttcttagcgtccgcgattcaaggaatgtctgaaacggttgtgatctaccaccgagagtggagcgtgggaactgccaagaatatcacgattcagctgtagattgaatgacggtgaggctggtcactagctgaaacgatcgacacgatgggatgagtggtgaaggagcagactgggagattggattgtgcgtgtgattgcggtgattggtgatttcggtgtttgtgatgatttcggtggtcttagtgattctagtagcccaagtgatatggggtgtgaactgtcaaaagagtggagcaaatgaattacacgagttcaagagtacaggggacagagaagcagcgagagtagagtgaaactgtagaattgcagagaaaaaaaagcgaagatatttccaaagttttccaaagaggcgaaagggaaatggacggtttttatcggtggaccacgcaatcccaaggtctactggtacttttcgagtgggttttcgtttttttatgcataagcaggttattgcggttttattttagtttattcagtgggtagatctagaatactgagaagactgagttggctatatgatagtggcatacatagtacttattagctgtcttatacaacatacacatcctattgactatgatccaagacataatataatacgtgcaacactccaatataatccccagactccataaaatacatacttaggcttcctccataccaagaccagcccaagaccttcataaaaagtctcaccttttgtatttgactttctctttggctttcattccctttattccccttcttccctttctccagcctttctagaaactcataccgcgtggtacatccgggctattccaattggtctgctcttagaatgcagtatgctgtccttgtatgcattccttatgaacaccctccgttgtgcaaaccttagatttgagcgaatgctaatgaatgcctacaatgaatgcccgagtataaaacctgaaacctcacctgttcaccaacctcgggtctgaatttctagatcggaggcctatttttaggaaacccacacgggccaacggtccgtggtttcttactcgacgcgcaagacgatcccgaggcactccaggctgacatgagtcacattctgaagtgatagaccgttgagttataaataaaaagcagagatttccacgtcaagggtttcaatatgaggctggggtaagtcaaggtcacggtctcggtcacggattatgcacagccacggcataaatatcggcacgggattaatgcatccatcacttctactaaacaatcaccattcctgattctgcacaataacagaaggaccaacatattccttccggcccttgacaacatacatcccaaggctgacgataaaaaccccaacaaagataaccacactccaattaaagttctccagagtgacgtcggcatccccgggccacaacgaccagaagaacgcgaaacagcagtaaaacagcccaataatattaaccgccagtccccaccgtcccatatcccaccgacgcggcggcagggtatcaggataccagatcttgcggtagatcacgcagctaatcgatgtaatatacgtgtacatcagcgccgccacgttgagcgagataatagcgttgaacgcagtctcggagccgatattgataagcgataacgcgcagctgatgacgcaggacagcgcgatggcattcacagggatctgccgctgggcatccactttgccgatccatttcgcgaatgggaggccctggtcgcgggcaaaggcgaaggtctgtcgggaggtggaggcgttgaagaggatgttgctgaagatcacggggaggatgataatcgccgtgagtccattggttccggcgatagacgttgccttctggaagacatacaggaatgggaatcccgtggcgtcgtttaacgagtcttcgaccgacggcgtggcgaagagataggtgatgatcatgacgatcgccatgaggccgttactaaagtagccccaggccatggcgatcggcacgtatcgagcggcgtctttgacctcttcggacatgtgggccgttgcgtcggagcctattttgacttagtatcaggttggagtctgggctacgggcttgcagacatactcagagagccgtagatagctgagatctgtcccaccatcacgctcagtcccatcgtagaccaaccgccgtaattcttccactgcgtcacgaacaccgcttcggcggattggtgcggagccatcacccacaggacgattataataaccgcccacgatacaacgtggagaatcatcagtaaattattcagtacgggcatcacgtcagatccgtacacattgacgatataaatcaccaataccatcgcaaagacgaagagcgtgccctgccagccctgcggatcgtaatccgggttccgcacgctgatcagtccctggatgatagttccagtgaggaatgagccagaggctgcgccagcttgccatgctaatactgacatccagcctataaacaatagcactagtcagaaaaacaacatccaactagagcaaacaaacagaccggtaatataactcaggaacttctggtatcgaggcgaagaccactccgaaacccagtgatactgcccgccagaagtcggagccatagatgccatttcagagatcgaggcgatgatgaatccgaatccaatgaatgtccatagataggagtagaagagacctggtaagcctccattatacaacccttcgtaattagagctgaatacagcaggaatcagagatgtaaatagacataatcttgtagtatgatattcatactcacataagaataaactcccacgtcgcttgcaaaaccgacgcaaaactcaaagctgccacaggtcgcatgtttctcttgataatgtcagacatatatcaacgccgtgaaacgtatacataccttgaactcctgcgcctttcccatccgctgcatgtcaatgtcgtcgacacctgcgcctgcctttaagtcatgctctgaaaaagcatcgcgctctacagcttgcacctcctggtcctgcatttctagcccaggtgctttggtcatggcgatggataacctaaccagcgattgagcgggggagaaatagaaataaatagggtaaaatctaaaatctaggggaactagaacaaataactaactaccaaggcatatatcccacattccccgaataaaagtacggagtattggccgacatccagacgcctgcagggcttatcgtgaggctagtctctagggcttcgtgcggagtggatcctttggctgcaactggcccgtctgggtgctccgactgttgttgattctttgttcacatatgtaggaatgatatttgcttttattgaatacgagaaatgctctcaattttccgtaacgaaaaaagaccgtggatctcggtatctagtgcaaggggagggtgtacaatgtagggctgtagggaaagtgcatcgacctcccttgcgcgatgactatgtggggaatacgcgcgccgcagttaatttgtgcaaagtatatacatgtacataggtagtcatttctggcgaggatgataggatattactctcgcatggataagaagatgcgatagtctctagtctgctctttttccttcgggctagggcttacagctactaatatgagcacatcggagacattgagtttaagattgatacaacagggatagagctggtatacgtctaatttccatacgtgcatacaagctctatagccggatggatagcccctgtacaatatcagacccgtatgctgtacatatcaagcattacgggcgcataccctggtcacaccttaatgcagactgatattggtggcttttagattaaaagttaatttgaacttcgtattgaatggtcttacgtaggaaataataccgccatctagttagatcgattaatgcgtaggatatattccaatctattctacgtctcaatcgctctataattgctttgctaatcattatagaaatctggagaaattcaaataaagccgatcggctaggccgtcccagtttgtctggaaaggttcatatatttttatacataatgcatatgctcggcgttgagtaggagcatgaggggtatcttgtctatctattaaataaaaacgtgagttcccgggttgaatccggagaacatgcaaatcgaagaatcaaatgactcaattcgagcgacgcgcttaagcagttgcctcgtcggctattttggacgggacgtcctccacggtgacctgcacctcgtggctgtgttccaattccgacaggacaatccacgtgggaacgaacgcgataaccgtgattccaaagttgagaccgatgctgacgaagtggttggcgccgccttcggtctgcatggcccatgcgacggtctgtcccagagcctcgaatccacgcaggataccgcagtggtaggataacgatgagatgtcggtgctgtactggccgaccagccagtagaggaattgctggaaggcttggccgctgaaggtccagaagaagatcagcgcgtacgctttgttgaagcccggtgtgaaccagtcgaacaccggggactcgggtaggtcgtagaactgcttctgtaggatagtagcccagatccaggtgccgatgatcagggcaacgacggagcagaatgcaattctggcgcgggtcttgatgaagatggtctggcgatcaagcagcagcgccatgatgaacgaagacgcgattccggcgaagttggtgaggaaagatgagaatgcgcgagatcgcacggtgaagtaggtggtcagccaggtgctctggaagccgttgtagaagtaactgatgaagaaggctggcaggaggaggagcacacggcgagtgaagatcagagaaaaggcagccttgaattccttggcccaactctctttcatgttcacaaccacaagagagtggtccttgcgctgcaccttctcggcaggactgagtaggagcgaaatgggcagaccgaggcacataatgacaatgaagacgatataagtcgaagcgctgatcgttccctttccggccgtctgtgcgttcagtcccagactgattgcaccaccgacgatcggaccagaagatttcgcggtctgccagacagcgatgtagaaagcgcgctccttgggactgggataaccaatgataatagcggcctcggcagcccagaaaaatcccgctgagataccgcacagggcggagccgaagagcatgaaccatgtcgtggtgtggtatgtgttggtgtacagaccggcaccatagatcgggtaaccgatcgcaccgagaactagaccgtagcgtagaccaatacggttgttgattgcaccagcggcgatacaaacaacggcaaataatccgtagaccaaagcgttcgccgcggaaacagcgtagggctcggctgcaccacctgctccgaggttgttcagtgcatcccacattccaggggcagtgaatgagacaccactagccacggcgatctggaaggggatagagcggtaccatgaagtccgagacctggtgatagtttgagagtcatcttggacttgctcagaaacgacttctgacgcgacaggaggggccattgtaaatgtatgccctctcaagagtctttttcttgtatacaatataacaataaagaaaaaagaacgaggacctggcgaggaagttatataaaaatttgaagaatcaaggtggatccgctatatgtcgtgcttgatgccaagatattccaaaacagcaaaagcagaatctttgacacatcgcaacgtcctgatcaccgggttttgactagcttcgggatttggacagcaaccctgtggagtggcgtgacaggttgtgcaatttccagctcagaggccattttcttgtattgcatataaggcagttccatcctcacacattggacaacaatcgctcttttcgcgcgtcgcgatttgccagaaaggcgatcaggccaacactcaggaattgtgcgacagtgatgaccaaattcgagatgaatcccgctcgaaagtctggggcagaaacagccggatactgaaatatctgtgtccatgctgccatggcctggccgattgcattcatgcttgccgtgacgatagcgcgttcttcggcatccttggccatggtgatagtcgcccaactcatactgagcggactaattgctgtggaagatttagtatcgtttttgatgctagaaataacagaccagagcctgtatctgaatccacataccgccctcgaatcccgtgaggataaatcccgccagtcgccccgtttcgccgacattataaacaacgagcaaaatcacaccaaccaggacgggaatgctggtcgccaccgaaggaatccaaaagtttcgcaggcgatcggcggtaacgcctgctactagtgcggctacgacagacaacgccgttgcgattgtcggcaatgtgttcacccgtgagacggagtagatgtctggtttggccttgagatataggctaaatggcgtcgaatatggcgtgaagttctggtccattaaagtccaatgcaggacaaagacataccaatgccatcgtccgaagactcgcttgaagatggcccgggagactttcagctcactcggcgctgttagacctttcagacgaatattggcaatatcgtgctcggtcgcagttaggaaccgtggctttgcgcggtgaggaacatctgggaaaacgatatatccactgatctgtgttagacgaacagtgaacagcctcggaatagggttcttacagaatgcaaataggaattgtgataatagtgcaaataatgaacagccacctgcaacgggtcagtatcaataacatcacatataattagagtcaaacctccacccaggcaatccatgcctcccctccaaattcgtataggcagcagcctgcaagtatcccgcgaacatagtcccgagtggagaagcgataaagaaaagcgcaacccgccgcgtcacctccccgggcttataccacgagccgatgacatagatgacgccggtgaaagagcaagactcgcagatcccgatgaagaagcgcattgcgtatatcgtatttagattctgcgcccacgcacagccgaatgtgaatagtccccatcctatttccagagtcggcaaggcaatgttgatctgcgtgcgcgttaggtagtagcaggccggtatcatggatgtgcaatacgaggcccagaataccgcggttatgtagttcaattcgttgccgtgcagattgaggtcttctttcatgcctctattaggtgttagtaaggggggtctgttacactgagggtgtgacatacgacacataggcattagtgatcgcctgctggtcaaggtatttggtaaaaaatgaaaggcagccgaagattagaatcatgatatccagtttgaggaccagctttttctccgggtgtggcatgtcctttggataccacttggtatacgtaaggaaccggagccatagtccatcctgtagctctgtattgggttggaattcatggtcggatacctcatggatcgacttggtaccaattgcgcgtacgttctccatatttgagtatatttgagtcgtttgaacttcgtacgggatgtacagctggaagcaattatccaagctgaccctctgtggtcatttcggttgtgcaagcctcgataatggaagatgcgacgattatcacgcctgatggtgtcatctgtcatctccgctgcttcatactgcggagaaattgcgaatcgcggagactggccgagtctgatatgcatacctctcgttagtgacttgggaaattgaaactagcttatcttgaatgatcaaattcatcattaagaacgaaagattgtgatgttccagaggttgagggcccgggccctaagtatcgaatatagaatgaagatgaattcctgaactgctcagaactgacatgatgtgtaacgcttgatgtgtatcgatgtgaagtgaaaacccctaaaaaataaatgctcataatcatacaatgtacaccccttcctcaactcctaatgtcgatcttgtactcctcggcccagaatgtgacattgtggtccacagagtaggtttcggttccgaaactgagactgccaaggtagtcgtctttagccgggtaggtacttccttccaagttgtacagatcggtgatgagaggataaatgtctccagtaaacctctcaaggatcgtgtccgcgacccaggacaagactagctgtccattgtcattttgaccggtgtaaagcgtgctgatatcatgttagcgtatgatatatcaggtacagttcaactttcaactcacaatttcgttccttccaaggttctgttaatcactgggctcccccaaccatggggttgagctatctcgtttgacatccagaaccaaaccatgacctcgaatttcgcattagtttcgttcttggctttgtcggcatcggtatccaagaacatatcaatggcgacgttagtggcaagggtttcagctgccaacgcttctacatctgttgattcggcgatctcgtcacccactccatatgtccaatgcaggtcaagatataattcggagatcgtgtccatcgcttttggcaacacatcatcgacgcgaatattggggtatccgtggacaggcgcagtctctgggccagggtcgaattgccaggtgatggagaactcgggagcggtctgggttggataagtctcgttgacgaatgtcgtgacctagatcagatgatacattagtacgtccgctgtagaagtgcagatggatgttcgatgcgtacattcatgcagagcccgtttcctgttgatgttgatgtcacaccccattgatttgggttcactgtaatctctgtcagtcgtcgttcaagtcaacagcgcctgcgctggtaatccaagagcactaacgcgtgtattgttcggatttcgacggtggactgattccgattgaacgattgcagtactgggtgctcgacacgccattgttcgtgacagtgtgatggccaccaccgccgccgccagtactgtcgctgccagagttgccgccagagctgccgccgccagtgctgatgccatcgtcagtgtcccccccggtgaatagaggtttctgaccattcgctgctcggtgggcatcaatacccattagagctccaacgcatcccccaactgggatgcccaccaggaccgcattgaccagtagtcctaacgcgacgaccatgaccaaaaacgagagtggtataaagcaagaaactaagcgagagtgcaaatgataaaggaaaagcgagcagcaagtacggagtacagcgagttagcagctgaaattctcggcctcacatcggaagatgtgaacgggtggatggagatgcatccggttagtctgtctagggcgatcgagaactaagcgttgaccacacaaatcttgttgataagaaaagggccctgagtggggtaagtccaggtaagcgtggtaatgatgtgctcatgacttgtatattacggggggattcaggtacaatcaggacgatctggtacttcaggtacagcaggtacagtctggtacagcaggtacggaaccacatcatttaccgatggcacttttactgcatttgaatttatcattggttcagttcagtggcaaatttatagatgaaaacatggaaccatggctagaattgctaaaattaccgaaaaaagaaaatagattatttaaagacccactttgatgcaagcaaaaattaccacaaactcaaaccccgtatgtaagaacctaaagctcagtgaaacttacgttgaaaatttcaccagaatctatttttgcggctcgggcctaaagcggccatgcacctcggtccttggcatgcactagtcccagggcttaaccagctggtcccttagagatcgctggtttcgtattcttctttactaggaatgtgagactttttctcttccatccttccattccagctcttcgggctgatcacactcgttttcgacgtttctatcccttccaacgctttcaatatacattcttcgcctttttgactttacataatctatagcctttctgtcgaaatggacaggcgtggtggtcatgacgaggacgaaaaggtagaactgaatgcctatcctgccaaccattcaaaccacagcttcgaatctcagcctttttcaccctcaccagtaactccaaggcctctcactccagtcagaccgggtcatttccctaccgatgaatacgggcaacccgtttggcttcaacccaccgctcgaatgtcgggcaactccgattcctttcacaactcctcctgggacctacgaacgccgtatgattcccggtcggcttcacccactctagttagtacagtccgtctttgtttctttggtctctttgttgtcggtatagatccagcctaaccggtttcccatacagtatcaaaacaatggagtgcaagaaagccaccagagtctagctcccctagtgagctccccggctcccccgggatttgcaaaggattgggtcaagtctggatcgattgctcgaattaacgaccgtgatgatgcggatacatggaaagggtggaagagatgggtatttgccctggtaccgtttctcacattcgccaacaccggaatctacttgttctacctcgggctgagaattgcctgcattatcatggctcaaaatgtttctggagtttcatatgccggagcttgggtttttgtggctatcgagatcactgttgcaatcccctccctcatgcacaactgttggactatgatggcgttgaagaagagaggccgtgccaagctgagattgaccggcaatgactgtccgacagtggatgtgtttattacctgctgtggagaggatgatgaagtggtcctcgatactgtccgtggtgcgtgtgaccaggactaccctcccgaccagatgagggttatcatcttggacgacgccaagtctgccaccctcgaggctggctgcaaccaactcgctgtgaatcaccccaacatcatttacatggctcgtgaaaagatccccggaaaaccccaccacttcaaggcaggtaatctgaactacggtctggagcaggtcacccttttgcctggaggcgccggccagttcatggccgccctggacgctgatatggtaagttacaggtcccggcctacgttgaaattgaaattcctgtactgattgacaatctgcagattcctgaacaagagtggcttcgtgcgattcttccccacttgttggtggatcccaaaatggcccttgcatgcccgccgcagcttttctacaatacccctgcatccgacccgcttgcccagagtttggatttcttcgtgcatgttattgagccgatcaaggatgccctcggtgtggcttggtgcactggatctggttacgtcgttcgacgcgaggcgctcgaagagattggcaacttcccgctcggttccttggctgaagatgtcgcgacctccacactcatgcttggcaaaggatggaaaaccgcatacatccacgagccgcttcaatttggtaccgtgccggaagactttggtggacatctcaagcagcgtacgcgatgggcaattggaaccgtcgacaccgctgccaagctgaagttctgtctctggggtgacgccgttcgacagatgaccgctgctcaacgattctccggcttcctctatgcaactctcagtgtctataccctcctgctcaccgcttccctctttgctatcccgatcatcctcttgtggggcaagcgccttgtcgcctttgcgacagaagagcaactccgctggctgatctggtcctgcttcgccgccactatctccaaccgtctgtgcgaactggccctgttcatcccggcgggctataacaccggccagcgaggctcccgctatcaactttggatgtcaccctatatcgctctctgtattgtgcgcgccttcatcctccccacctggctgggcggtcaaacccaagccttcaagcccactggttcgctgggctcagctctgaacgagcgcgacccgaacaagtccaagaacatgttcgtccgcctgcgcgtgatcttactcaactacatggccagcttccaccttgcctttgtctacgtcaccctcatcggagtcgtcatctcctcttaccgctgtttcgcccagaacagtggcttccgagatatcatcctctgcctcatcacgcatgctttctggcctccactgaccttccttttcatttgcacttcgctgtggaccccggtctcgtatgcgatcgacccgccacgcatgccggagcgtgaagaactccttacacgtgaccctaagactggtgtggcgcacccgacgaagaagagtaaaaagatcgccttcggtggccaggccgcttggttcgagcttgaatacacggttgccaccgtggtcacaattttggtcttcatctactcgtttatgttctaattttaagatttcctagtttggaaatctgtctgcatagctaacgtgtcacatgcttcaatcccgatcctttatcttatatgtatctatctacacctggggaatggcgtttaagctttgtgtctttccggtgtacaactactctgcatattcgatcttcgttatacatgaatacatatgttgatcaactccaaaatgacttatcgccggggctgtgtagtactccatgcataaatagtcgatacgtacggagtacagccttctacatgcccctttcggccaatcacctccagattggtctaagcgctggatttaatttcggaccaacgcgggttggctatctgagactttgacttgccttcagccaaatgcgccaatccgcgatattaattaattctgcattgaggcctgatagcccatttgccgtgtcaacggttatttactccctgctttattgcttatctagtgctattgattgcccacgcgtcttgatctgccatttattggacttgttctttttatagtctgcgcgtcaccgctattctgctgacgttgcttagccagagcctgtgcagagagcgacataacgttgaaagcttgactcaaaagtgagacagataattatttggactttctcttcatttaatattaatatcgaaagatacaagggtttgttactagctcagacggtcgtcctgagacttggtctttattggccactgattctctcgccctgaaacaacttcttggcgaaagaatcctcatgaatcttttctctttctgaatcttcgtcaataattagccaggttccatcgaggaacctttgttgatcccacaatgaatcatcgatgatgttggttcgcttgcaagcctcgcaaaagccgaccttgaaggatcgtgacctgctagttctagttctagttctagtctggcggcaatgccggaatgagtcatacgtttaaatgtggccatcgccattggccaatgtggcaatgtccacagtcttctctcgtggctctcataccccagattccaactcatggacaaacacttccatttaaggtatgtctaaaccgccggcgttgatcggattaaccccgaaccgctgacgggtcgggactttatcagctgcccgtcttgccagtagtccaggactctttgtgatgggagacgcctttgataggcttcagccactcggtccggtttccaccccggtcacctgatcggtttttaggtatatctcccgcagggaatggctatctgaatacaatcagcctccagccatgtcaccgggctcggattcgaaggtcgagatccggttatgcggcggattggattggtccacgcttcggaatccatgagatagttgcgattgcgatggctatatagaagagcagacgtctccgtctttggatttagttatagcaacgcaatcacaacagttttactatccaactatcatctctttcgaattgtattcacaatgtccttcctaaggaactacttcggtacctccgctgtcccggcgaaggaagagaagaagcccatccgtgccttgcccgcctcctggtacacatcgccggagatgtacgagctcgaacgacgctccatcttctcccgaaagtggcttctcaccacacacaagcaccgagtccccaagaacggcgacagtatcacatatgacgccgcgggctacgagttcgtcgtcgccaaagacaacaacggtaacatcattgcataccacagcaacgacctcttccccgcgcatgtgcacatcgatctaaacggattcgtctgggtgaacctggatgccagcgaaacccctgaggtcgcctggaaagacgacttcgagggcgtcgatgagcagccccggttcaagcaatacaacttcgaggactactccttcgatcacacttgggatatggcgggcgatttcaactggaagatcctggcagacaactacaacgagtgctaccactgccaggtcgcgcaccccgacatccctaccatcgccgatctcaactcctactatgtcaagaccaaggacggccacatccagcactacggcgcccagcgacctgaccaggtggccaagggtttcaacattgcagttacctacttctggccgaacgcttctttcaatatctcgtgagtataggataatatccctatattataataaacactaacattaaactcctagtcccaatttcttcttcatgcagcgattcaccccgaccagcccgactcaatgtgtaatgcgctacgaggtctaccgtcacaaggacgccaccgacgagaacttcaacctcatcagcgacatctacaagcgcatcatgtcggaggacaagtacctgtgcatgcacacgcagaagaacctcaacactggtgtctttgtcaacggccagcttcaccccgagatggagaagggtccacttcatttccagaagactgttcgtgatgttgttacggaacactttgctaaggaggaggctgcgggtcatcagatctggcctgcgaagcatgatcttcctgtcggccaggagcaggataatgctttccgtactggtgtgtctgactacaaggtcgatactttcaagaactctatgggttctgggctctctacggtaacggcgattgctgtatagagctggtgggtcgaatagagatgtttattgtatatagtttgatattgcgtcgcattgtgttgatgataatgattgtgaatggttttcttttggaattcagccttaacagaatggatatttcgatgttttgatatatctttgacctccaagtctgataatgaccagcctatactgaccaacttggaccgtagcaagtgtatgaacagaactgtaaccaacaaactattctaatcaaattatcccgctaacattacattcatttatacatatacattctcccaaacccaatcactcaacccaatcaacaaggaattcatccaacaaatcataattagtcctctccctctccctccgtccccgaagaagatcagcagcaatatcaaacttgggctcaggtctagagccctccttctccggcgacgaagcccgactgggaacatttatatgtcgaacgacatcagtgttcccttcaacaggcttagtactgggcatcccagactcagaatctaccaaatcaacctcaaccccagtctgcctctcagcatcatgtacttcacgcccatcgactcccacagccttgacaccaagcagcgacgagccacgcccagtcgtccgcctaggataatgatacggctccgaagacgccggcgactcagacctcgcacggctatcactatgatcaacggaatcaaaactccgcggcgaccacggcaacctctgctcaagcgcatccttatcctccgacccacgctgcctacgcgcaccagcacgcccataaccacccgggtcgcgcgaacaataccgatgctcacacccatcagtcaacaactccgtaagcaggacatttaactgcgccaagcgcttgacctgtctagccgggatcgcatcctcgggatactgtttcctcttacgggctccgcgcgcgccgattccgattcccatccccattcccatttcggattcctgttcccgttcgcgttctcgttcgcgttcgcgctcacgctcacgctcacgctctcgactctcccgcagcccgcgcgactcaaaccgcggcgactgcccggcttccattttcagcgcttcttcctcgtcgtaggcgatcgcgggcttgaagccgatgccgtggtcggtcagtacttggttgaggtagttcacgcggctttcgaggaaggctacgtagctgcgtggcacttcttgttttgtgagggggtcatagcccacgcagcgcacttgggctttttcgcaggattcgcagcgcggaaggcgctggtcgcagcggtgtttgcggatgcgacatctgttgcaggcggagacgctgcggaaggggggcgctggggggtcggtgggttcgtttgcggtgggttttggggttgggttttggttttggtctgatgtgagcggtggggaggttggagggtttctgcgatttgttttcactgttttggagttggggtgtggagtggttcgtttggtttctagggaggaggtagtggaggttggggatgggagtttcagcattgtgtatagtttataaggaattgagattccaggagtatgaaatgaggattttaagagctacatggtaaaatcctttcagcaagattagtatactccttactccgaagctatgtactccaaatagggctaatatttctgatagagttcggattccggttaacacaccggagctcagttctccccgggtactccataacggaggtcataactccgagtgggggtttctttgtttaaaagggggatatataaagaggtcactaaagaggtggctatgtagagcctttatatatctgtacatagctcctttacccctatattctacttcccaaacctcgatatcgagcaaatcgacccgactcggccgaatgccacgttactggaatgtggagcagccgatatcaacccccacgctgaacgtcaaaacttccccattcggaattcgggtgagagaggtcgggtatcgtctcggcttaagacggaaagcaacgccattgggtgcatggaccactgcttgtccccgcattccttatatcttggagagcgaagtacggaagagtataaccgatctcgcatatctcggttatacatggtaagccttttggcgttcttccatataggattgtatatccgaatggaagaatgataactgaattctatatggaacaggtataggtatcttcacagttatggcaacattgaagtgacatcgttctagccctagatattctcatctcacccatttaaaggttgaatataagcttctgtacatactctcaaggaagcttcctccttgtcgatcttccaccctcttcatgtcaatcttccgtgtcaatcctccaatctagtcgagtataatcagctagcttcgccctattccgacatagttcaccttcctcaagatccacacatctatgctcatactcaaatcacccgaagtgtccaggatcggtcgatagtgcacctgtaagtgtaagaactccctccgttcactgtcccgacttccccccgcaatacccgaacactcgcacgatgtcagaccctcggtccctgtttcaagacaagccgtttaccattctgctagcgtagccgaagcacatcctccggtctaggaccctcggctataacaagcccctaggggcgatatcgtcccgagagtttgaccggcccaaaccgacagtggcccgcgggggaaatgacttgtacaccggcacgattgccgattaaccccgcgagcgagtctggtcatgagccccgttcaacaattcccgtacgttgtgaccctccttcaaagtgcttttcagacctcgatcactctactcgtgcgttatcggtctctgcttcgcgacggaatatgtaacccatcatatatatccctcaatcataacgctgatccggtaattcagggcgaagtggttttccggcagtatcctgaggcaactcctgacaaaactcagtcgggtcggtaccatgtatctctcttacatgcatatgtggttgtcgttgttgcatttccgtcccacgaagaacggccatgctagccgcagcctgccgtgttgctcttaaccgtctagctctcaactaaacaagtgtagccattgcaactagtataggaacgcctatcccaacgccgagtccgagtgcaagctttgctgtcgttgtgagtgctggcggttgatcggtcgggctgacggtagtatcagaggaagggaacgaagatgccaaagttgaattgactggaatcgaaggcgtggtctttgccgtcgatgatctttcggttatgttgaaataggcagaggggaaaccgcctggcccagggttgatccagaagaagaatgtgggtgaataatccagatcgaagccgtagagttggacagtccaggtgaagttcgatacatggtccttttcgtggacttgggctggctcttgttagtctgggatcttggcttcggttcttccttgggcataccgtatacgttgcctcgagtgtaggcgcctcctcctaatagactctgctgccatatagatacgttgaacactggtaggtctgttttccatgcaaccactttctggtcaccgagtgtccaaactggactttttccgttgatgtagacagggttgatcatataattggtcttttcggctttgacggttgcgaggagggcagagagaaggattaagaggggctggaacaagcgtatcatacttttgatcttcaatagtggtatggcagagcttaaatgttagaacttcacgtagtccacgggtgaaaatataagaaaggtggtctctgacgagtggacttaagtaggtattaggggctggcaatcctggttaggggtgtaaccaggtacaaggctctgaggtagtctgtattgcaatgcaatagcgaaaaagagattatgaaggcctgggattatgattccagctagcaattttgagtgagaaacctgagggataagatagaagtgttgatacctatatttgcctcactctaaacgataatcagacaattgttaaaggtatatgattgtctctgaggtattcatgtttcacttcgtagtctccgcagatccagatacttggcagcataatcattagccaataccgggtcgcccgtaaggtgcataacagtagccttcttggccatcatctccgtctggcccttgatgtcctcgatttcctcgaaatgatcatacgccgagtcaatgtacccaagagcacggttgatgtactcctttctcgcagacgtcgagtcccgaccttgcaagctccacaactcacccgccatgcccatatttgcatccacgagaagtgaatacgcctgcgcaatgagactgaaattttccgactccaggacctggggcataatgctctcgactagttcgcccgtggcttcaaattcacgaagactcagcaacactgtcgctagtgtgcagatggattcccagaggtcagcgaggacttttgagcgatgtgcgatgttggctgcgcgcatcgcgagggagaagccgcgttgcggttggccggatttgccgaggatttgtgcttttaggcagaggagcttgacttgggagtggacgtcgaagttctctggttgcatggagtgcgcggcttgctcgaccattctcagcgcgcgaccatagtcgccttggcgcatggtgaagtctattgaataaaatgctagaagtaggcgcatgtcgaagtcacggagttgcactgcctggagttgggatataatgtgttcgacggccaccttgtcgttgctgtaggctgttaggaatagatctgtaagaagtcatacggttgtacttaccgacagatttgtcgtcgcaattgcagtagccctgaaaagaaagtccaggcgttgttgtatctgaaagctcggagcttctctgggtcgattttgttcatccgtgtgaatgcctccttgtaattgcctttctgtgccaactgtaggtgatgaatcagcatttctgtcatacacattcagaaaaaagttgacatactatttggcaatttcggaatgtgatcttgacaaagtcatcatgaggttggccctccgaatagcactcgcggaatatctcggtgttcagccaagcaaggtgtgtagctcctgtcggctgattagcgtcatcacaattactatacacttagtatcatacctattctagcgtacatggcgccttgtaacagcatgtatgcacccgtgggagttgaaccgccctttgtcacattgacgtgggatgctcgcacgaaggtttcgacaattgatgcaaggctctctccctgctcatcattagcatcaacttagtcaaaggaaacagggatacttacttgctgcatctccaacttagcctcgctaagtaatgttgtgctcatgagagaccacatgtcagtctccttggacttggccttgaggaaatcaaggccctctttctcattacccagcatgccactgttctgaacttcccgcatctgctcgggaaaagccttgccaaagtgatacatccagctcatgcagaagttcaggcagttcatatcatgagactcgcgagcaatcgctacggcctcttgcacggctgatatagcttcactgaaacactcaaagtccgcttgcatgatagccaggttcagaagggcaaattgataggcactgcggtcgagatttgcgtgcatggtgtagtcaaagtagcggtggagattgtcaaaggccgaggtatagtctccagccctccaggcgtcaagatatctgtcatttgtcaatcacaatgtacctcgataatgatgtatgcaagaacgtactccaggtaatacatcattacagggactgaagactctgaggtcatgatgcgtttcagctgagccctcatttcatccggaactctacctcccattcctgtgtctgtcagcacatggtcatgacagccggagagaattgcatactttgcagttccccgacttggaattcgatcagtcgctctgcatccttgacgctgacttcttcctctccatcctcatgatcttcgatgtcaccatataccacctgtgaaaggtagctggttgaatccagccccaggtcgcgtagattaacatcaaccgcgatttgatcagcctcgggatgtctgcgactccagtagccgtatgtgggtagacggtatttgacaaatccggcccagagcttcacagaatcatggaactgtagccgcgtgtattcaagataagctctgcgtacgaacgcaccaagtggcgagctcctagacaagcgcatgcgatcatcttccactggtggaattccattatccctgtcatggatcaattcgtcgcgtgatttagccaggagcgacgggatgacctcgccgaagaaggtttccagcgcatccagcgagtcgatggaccagaggttcttcagaaacaagtcccagagtgtacgcccaggaacagaggactcatggcgagacaggcattcttcaagctctgaaattgtcggcaggtaatgctcctcccattgcttatcggcggcatctagtgggaacagacccgccgtgaggaacgagaggacgtcaatagcagaagaattgggcacgacgccttcagtgtagagggtgaccagacacagcaaagagactctccagggagtcaaataacgcgtcattttgcctttgctatggctgccacatcttgctgtgttctatcacggtattgttccaagggcgcgcgtgttggataattgatcgacacctgaggctgcaaggccgcaatgcgggacagtacttgggaaaaaaaagatgacgcataattactttccaactcaccaattgaacgatttcacaatggctcaagctctgacaaccatagatctgcagggtgccttgcctcttgtcgccagtggcaaggtccgcgacctctatgaaattgacgataagaccctcctcttcgtcgcaagcgatcgcatttccgcctacgatgtgatcatggagaatgtatacaacaccacaattgcgtaccagactgcttgctgataccgtctacaaaatagggtatccctaacaagggtgttctcctcaccctctgtacgcaaacgtggttcaaggccctgaaagaggcaaacccctccctccgcacccacttcatcaccctcgacctcccacctcagatcccggaatccctccgccctgttctacagaaccggagtatgcaagtgcgcaagctacgcattctccccattgaggcaatcgtccgcggatacatcaccggctcggcatggaatgaatacaagaagtccgggaccgtacatggaatccaggtccccgccggtctgcaggagagccaggctttccccgacggtcccatctacacccccagcacgaaggcagagcagggcgagcatgatgagaatattcatccagatcagggtatgttcatttcgaatctgttggtttgagatatctatactagatatattacacaacgagaagacctcacctaacatccctcacagctgtcgccattctgggcgaaccctacgcctcgactgttgccaagatggctgtcgagctctacaagacagcccacgagtacgccctcgcgcgcggtgtgatcatcgccgataccaagtttgagtttggagtcgacgaggaaactggtgaggtcgtgctggctgatgaagtcctgacgcccgactcctctcgcttctggcctaaggaatcttacgctgtcggtcgcggccaggctagcttcgacaagcagttcctgcgtgactggttggtcagtgagggtcttaagggtaaggagggtgtgcgcatacctgatgatattgcgcttaagacggcggagaagtaccatgaggcttgggagaagctcacgggtggtaaagtctaagtatatgatcaaggcggttatggaggggtatatatgattttagtgtagattttgtatttgtttatgattgattcgagacgagaatgaaattcaagtgtcatgtccaaattgtggccctgagggtgtagtgggaattattatacacatagttttatcctgtcctatatttactcctcccattcagacttcaaccccttgagacccttcttattcgaatccccatcctgctttttgatctcttccttgatggacttcaccttggacttcgcctcgggttgattagtccaaccagagctaacaccctcatcaagaggcagcgcataatcaccacaaatacgtcgctcctcttcaatctccgcctcactgatgccattcgtggcccaaatcttatgaatgcgtagatcaaagggaccctcaacacggtccgtaagaccaataccaatactcttaacacgctgccgagtcaaagaagtctggggctcaatgacaaagccgtgattcgtacgcacaaacgagttgaaaggcaagagaacggtttcccatccatttgagccagaggtcgttgtactggtagaggtagaaatgatcgtcgattcaggtgggacgtctgaaagcgcagcgggcaagccgctagggtatagctcctcgacatcatcgggtgagtctgcttggaagtcatagtcctcctccgattttggtgtgtcgcgtaggaggtggtgtcgcgtgtatagtctgtgctggtgaatatccgtctcgacgaccgcgtctgtctgcacgttgacggtgtatcggcggccgtcggacttgatgcgcagagcaaggtatgcatagggatcaacgtcccagtaaagtcggccgaagagccagaagcctcgatcttggttgcggaacgcggcatagcctggttgcgggtattagttaattttaatctttaatcttcattttcgtgctctagatccttgtctgtgtcgctaattaggcagctggtagataacataccggttctttcgacgcgccagttgtcaggaagcttggttgagatgctaccgtggaagcgggcatgcgcgggagtatttgtagaaggttcagcgggttcgtaatctagactggctgtgctaaagcctcctactgcgcggtcggccatggtcttgcatcctgtaacagtgccctcgttttcgaaatccaggaggacataaggtttagtcggggtgtggagggcttctgtgttccaagctgcgacagattagttgagctgcaagaatgacgacatacaacttaccgatctttgacagacggccgaattcatcggcgctgcgcctgaagaatccggcttgggctaaacgtcgagttggaaacatattggagtaattgtgaggataggaagaagctctgacgtgcctggagttgcttaattagctgtcggcttccgaggtggcgtgaacggccgataagataagtgtttggcttgtttgtctttgccctcaacttcttttatacttcagtttcattgttcctaaagacacatgggaccttgctaactctacattctctcgatcatatacacgtcattatgttgcaaatttactttccagggattcggaatttgggatttaagagtcacgctaggtgcacaagacatcttgaagacttgatcatcttttgtctctgttgagctttgtactcttgttattgaatgcaatgtatctgtcgatatctgacgacattctgatcattccgcatacttcgctaggcacatacctgaatcggttatgatgcgtattcctcttttgggaaggacatccaaagttcatgaccaactctatctgaagagtcatggatcatatgcgcgataaacctcttcatgagggcccagctctgtctttctcctgggcgtccggctttgaaccagtggttggactgactagccctggtaatgcctgattctgagtcaaggtcgctgcataggtaccacctaggcagtcctgcgagggctcccccggaaatataccgtggttagctcatatctactttcctgtgctggggtagcctagttctggaaatcggatatttcgatatttatcccaaaatggcgacggagatggtgttgatagaggatatcccacgtagttatctcgatatctctcttctcttctctatacattcataccacgctcgtttaccgcagttgaaccattcgtctattgcagtacaaacatccatttactctcgttgattatataccgccgcaatggctatgcattacgttgaacagaatatttctgcgcctgtctcttggtatagtgccccggagcctactatcatatggcaagatccccatgatacaggttcggaatctagtgcctttgaatctggtagctcgaaacctagtaccccagagcaacctgatgccaggtcagtcgagccatttaggccagttgagacagtccaaccagttgagctagtcaccccaaaagaaaccaagccaggagacaaaaagaagcccggagagggaaacaatccggtatacatgccgcgtgaagaccgactgaatcaaacaccgaccaagggaaatgcacagggcctctttcttcctgcttgttgtgtctttgtgggaaagtaggtatttctcgattcaatctgacactgtatactgactttgaatagcctctccatcaaggtttctcctgaaaagttggaagaagaccttacagaaatgatctctacatttggccggtgtcatgttaaaatcaaactatcccagggcgtgaagaaactgcctgttggatttgtacagtttgaagtgagtacaactgtttgatacatgagatatatatctcatatggtatactgacatactaaataggacaccaaagcagcaaatgctgcattaaaacaaaatggaaacctgatgcttcataatcgggtgttgagattggaatcatccaaagcaagacgtgagtgttctttttattttattggacttcatctgctcaacaccttttgcatcctgcaccctgcaccttgcacctttccaccttcgcactttctcactttctcaccttctatcttcacaccttctgaactttttgttctccttaggaactgccaacttcggtcgtctctctgatgctcccgtcgaaaaagctgacgtcgttgctgccctgaggggacgtggtagcctcgagagcatagctattgagcacttcgtcaaccaagacggagaagactctacctttggtgttgtgactttcgcataccccgacgattacgcagatgccctccaggtaagtcgactgtccaagtttgctttgactccactaaccacttgaccattatagcatttccaaaacaatcctgattactatatgaccagatccaccatggatcccaacgaccagcttcctcaggattaccctgcaggacacaggtcatctaaccagcctcccgcaaaccgtggcaaccagcagcgatacaacaacactggccgcagacccttccaccgtccatggtatagcggcggcaacaataacaacaatagaggcggattccgaaatgctcctggtcctgcccccagacagcaaaacacatcctttgcaaatcatggtcacagtcaaagcttcaatggccagggtcattcgtctcacggctctttctctcagaactactctggcaatggtttccctcagaacaacttcaaccaaggctatcccagccccaaccccaactacaatcaaaacttccctggcaacaacttccacccaaactatcagggcaacttcccgaactaccccaatcaaaacttcgtggctgcgggtccctttcccaatgcgccagttctgttcaaccaaatgcaaatgcctgaaggcccacccccgccatatcatgccgagtacactgctatgcaaaacccaggttttcccgtgttcttgggcaatcaatcataccagcctcccaatactcttgcaccaatgatgactccggttcaggctgttgctggtcctgttcctggcgctgttcctggcgctgttcctggagctgttcctcgtcgccggcgattgccccctcgtccagactgtcccttgattgtctccagccagcctcaatttgacaccgaacagcacctgcaactctactatgagccctatcccggtaacgaacccgtcgtgaatatgcagccaggctggaccggtcacacttgtttcgtgcagcctgactacaaccagccttgcccgcccgacgcatatcctcacagtcgccaatctagcatggaaagtcagcataacacctgttcgccgcccagggtcaatgaatccgagtcaatcttgacccagactaaatttcacacccctgaggtcgagagaggtcgcccactagttcggccgcgccatcccaacaccgatggaggctttgacacggctccagtgtctgctcctgctaaggctcagagagactcatcctctgttaaacccctggatgggtcctcaggaagagccagcaagtccactgatgctcaggttgagcccgctctacctatgagaaagcctatcaagtccgagaacaaagccaccgaacctgagaccaagctcaacccgcctcagcctgaatccacctgtggtccgagtcatgatgaaaagaaaaaagaattgatggatgaaatcaagccaccgttgagcattgataccaatgaagaaagcgcagggtcctcctccgaggccggccctaagacaccagacacggagcagtctcgggaaagcgctaaacttcagactccagccaaagctggctcggtgaaatctgccggtagtaagacccctgatagcgctgaaaccctcaagccagccgacaagggcacttcggacaaaggcaaatctccggaagtggccacatccactccaaccaagagtggcagcaaaagacttgagcccgcagtgccagacagcaaacatctactggctcgccatgctttccagcatcgcaaacccctcaagaaaaagtaccaacccaagaccgacaccggcaaaacagttgagcagtacacccgtgagataaatgcgcagcgtgcctcggttgacccagactcgcgtgtccctgaacatattctgcaagaggtgatccaagagctagagaatgagcgcagagaaaatattcggaagagtctcggtctcggacccagtgctaaaagtagcatggacagtggtacttcgaagaagaagtaggtgatattgcagtgatggaaattatccaattcgattttcttactatgatggggcgttttattattatctctttcttactcttttgtccatgctggctatggtttgttctttctttattcaatctgtgtgtctgcgtttcaaggaaaagaaaaaactacaaaaaaaggggagcatggacatgctcaagtcaagtaccaagtatcaattatcaaatttcaaattttattctgcaaccttgctcattcctatagtaatctaatgtatcgtattagttctagacaggggtggttctgattctagccatcagccctatgtggccgtgagtatgaatatataaggtaaaagaatgaagtagctcatcgatgataatatgataatatctgagttgattgatatgactgacatggccgaaatggccaatatagcaacttgatccccgccaatgtaaacgccgagaccgaaagaaagccggtttatatacacaaaatgcttctcgatgccagattgcatgccatagataccgaaaccgaatgccagtgggggataatgatgcacgccgaacagaaaaaaaaagaacaaaaaagaaaacaaaagagcaactttccttatggaaacgctgatggatagattagatgtgggtcgtgaggatagagatgatatgtatgctgtgatgggggtatgaggtagacaagtagagaggggaggggaggagcggagaggagcggagaagcgatcagatatgaagaagataacgctgggagtaaaagaggagagattaagtatgtataggagtgggaattagtgcatcaagctctcacccgcctcgcgtcgaagaagccaagattgacggctgtgtcattgacgcccaggaacggcgccgcatcctcaagtagttcccaaggacggacagggtagggaccggcaacacgaccgcggcgttgaagacgaagtcgactggccatgcagttcgagtcggactgtccggtaggcaagcccggtgctgctgcgacggctgttgaccccagtcctgccggagagggagctgagacttgctgggaatttgcagggtattgttctgaaattgggcctaggaggtagaggaagcgagagtcgttctgaaatggagcgaaaaatggacatttctctttcaggaaccgtgcacactggtggcggacttcgtctgggaagatgtcgattagcgaggcggccacgtcgagggcgtgggtctgtaggaggattcctggacagggacggaagccttcggccggagtcggatgcgggaagtaatccgctgcagggaacagacgaaggacgtctccagggaggctcgagagtgcgatgcagaatattgaggtcagaagacggagctgttcgtgcagaggattgatcttgagagctggtggcggttgggcgaatgcggaccgatggaggacgatcatcctcagcaaagcagagaaccagaatgcaagagctcgctcgaaatttgcacgagccgtgttggccacacccacacccctgagggtactgttgtgcagggtgatgatcttgtggagaagggcgtccatcttttccacgagcactggagcgacagatggagctccagaatcggggatgctactcgcaagctcttcaataatggtaagatacattttggcagtctccaacgatcccagcttgtccggcaaatcaggaatatcacctagtggctcttcaagcagtgggatggagaagaacgccttctcggcacgttcccggatttggcgtacggcgtccgggctcatcagtgcaaccaggtcaatccaatgaagtctgtgagcacgacagtctgatacggcagtcttgaacatggcatcaacaatattggttcggtcttcagaccctgagtccgcatgaaatagaacttggagcttcaactggcaaaatggaagcgagaagtcatcagtcatacgggcaagcttttcaaccttcgagaggactgacttgccgtcggactgtgactcgatgcccagtaaaaggtcaagcgctttctgcacaacacccaaagcggctgggtattggtcgatgagcttctgcatgctattctgtgccgcacattcggggtgtcgcacaagaagatcacgtaacagcatgaccatagagtgctccagctcagtgtgcccggtgaaagaaccaacggcattggatgatgcggcgtcgcaaacaatcttgagcgcttcctcggagtccttattgagaaattcctgctgtgctaactggaaccgataggacaccaaatcaaaggacttgctatcttcaccagagacaagaagttgcacaagttcagcaggcagttgggctgcattagggactattgctggcttagagagtgcgagtctttttgcaagggccaagaaagctctgatagtaacgcatccgacaccaattagcggcgggagaattcgcagcaatacggtacgttccggagatcgcaaatgaccacagacccaacgggcgagcatgccatcaaaatgctttggatggaaagacctgagctgcgcgagataacggcaggcgtcatttgctgacaggttcgtatcgccattatcagactccaaatgttttatgagtgtagtgaaaatggtgtccagagtgggctcatccataacatttcccgaatgcaaaagctgatctaacttctctcggaagaaggaatcaacgccatcaaaatcatctggaatgtgatccgacactggagaagatgcggccaccattgacctgttctccatccgagagagatcctggcgaagaatggatacagtattgagttcactcgggatgcgcaaaccaagttcaatcagagagaatatcagatcaagacttggcatgccaaacctcttcattccagcgtaggcatcaatgagtctccggaatagatcagttgtggcgccaattatgcaaagagagtcgaaatggcagtttgtggtatctgcaaccgaggcgagaacagtgctatcaccacaactagatgcaaacttcaacacatctgctaacattgaaatgtcgccaaatgtttcaagagcatcgcggacagtgtaaaactcggcgggagtcagcgcagacaccacagaggtattgccaatgggaaacactcctctgttactttagagttagtaagataattgacgagattaggaggaaaaagcgaatgctcactctgtgctccggttgtgttccgcaactgctctccgtaaccactggccaacatcggcttttacagcccaaggcaagtttgttggtaatgattcgaattccattgacgtagattcctggacaccgaaaattcccggtagacgttggctgatgatgtctttcacgctttcgatagctgcgttctctcctgaagcagagagcccagtacgattcagcagagtactccgcaagttcccaacatgctccggaagacgagcaacagggagttgcgctatcagtccgatatctattggtaagttcttcgcctgtaaatctgttagtgaccgaaacagtttgatctgtaaaatcgatcttaccttgggatcctcggctgaagatgatccattggtaacgcctcgtgccatgagccattgaagatagcggccaacagagaatgtctgtgacctgacaagttcagagacgacatggtagatttgatccacgttgagcttttgattattctgtccgctcgatagaaaggccagtatgtgactgtctacatcgacgccggccaatttccatttacggagcaggcgaacaccaatgtaaacccgacagagaccgtagcggaagggcgtagaaagccattccaataacttgaagaccaagacagccttgtcatcaaaagcgttgagatagtcaaatatagaagggagatcatgagagaagcgtatggagtcgagtagtcggacgatgtgttgatggggtgagcgctgggttgtctgtttcgagtgtctgggtcgttgcactcgcgcgttgcgctccgcgaggctctggaaaagagctttttctgcttcgttacccaaatcaagggcagataacacctgttgtttatacgcatcccaagaatttgggagtatcatcgaggaagtatggtcaagaacaagctttttgataaagcgaaatagacgatcgataagaggttgaagctgagtcaacttagcttcagttgcctattgctaaatgtcagtattggcgggcaccaagtagttgcaagttgaacacacctgtcgcactttgtggagcagcagctcagctaatcgtcgtccccttcgccgatatcgcatgatatttttccaatatatgccgagcatcaaaagccagattggaatcgtgacgatagaagcagcctcaaacgaggacaagaaccattcaaggaaatggtcatggtccagtaaattttcggaaaataaacgagcagtcaacccgactctagagataaggttagcatgctcatagtcgacgcaaatccaagggcacgtacgcatatgtcatcttcgccttccaatccggagacttggtggcagtacatactccttcaacaaattgctggacattcgtcgtccagtctcggacccattttgcctctaacccaacagccaaagcaccactggtgccttttcgtttgaaggcacgaatttcattcgcacccacacattttgccaaccaaacagcacgtgcaactggaatacatttaccaaggcactggtccaggaggaccttgccacggataccatgggggatggttcggctcaacctccgcagtggaacagatgggttggcgagatctcgaagccatgcctcacgcttattatcggtgagtgtgactcgaggcggcggtttaaaagttgacggggcgtgaatagtgttgtgactttgtcgtttctctaacgctgcagcgaagacggacgaaagcatttgtaaccccgtgcgattcttgagctgcgcatataaggcaggacgcgctgtattcgattcattctgcgagacttgtgtacggtcataatacccttgtttcgtggtttgctcgctcaggacgtcctccggatggtttccggtccatggggcgaagtcggcgggttctgtaacggacgattagtctccatagttaagattcagggatctggggtcgaattactgtgatctttgtataacggtgcgacggcagggatctcaatgcgatacggggtcgtttgtacagccccgacgggggagctttccctcgacttcacagtggcgcttccctcaggctcgggcacaaaattgttcatccatggctgggccggtaacggaggcggggacgggggtttcagtgcagcgccatcgccccgattctcattgctcgggatttccgacacgagagcctggaaggaccagacaggacggccgcgccacgaggctgcaggtcgcgagattacacttccggggttgttcttcgtttctcccaccgctaggccagtatccgacgtattcgacctgctcgggacttccagtctcggtcttttcgggggcggttctctgtcttgcgactcgggaccacctgcggtcaagtcaacgacggcgggttgtcgaattggcggttggggtagtgaggctgacctattgggctggtcatattgtcccaacatctgcgcattatcaacacgtccgagaccgccattgaaggttcgcagagggtggccccacggttggccgccggcagaggaatgggggatcatcttaggttcatgatgtatccaaagggaggattattcgggtcatccaggcgatgttcggtttcgagggattcgagtcaatcttggaaaatgggtgtaaacgcgcggaattaggtggaagtcgggttagggtgagctgatgtggaatcggggaatggccactcgggtatctgggtatctggatatctaggtatctggggttgatcggggaaaacacacaaatgctaaatgagggaaaggatcaatagggttgtacggagtcaagtacgactggagaatatagtatgtactctaagtcgagagaagtgcaagagttcaagcgtccaaatgtttatcatatgatttgacgggtaatgggctgacaataccaacgtggacctgcactctcgctcatttgcccttttcctgacaatcgcaatatctcgggattatttcctcttttcttcggtctttacttggtaaatatccgagtcgtttacgtacagcgctgacatttccagggcttcttattgcctatatcgttttgccttctgtcagtccgtccgctcccggaaatcgccctatctggtgatatgcctcgccggcaagatgtcttagccgcgcgattactcttgaaaccccaatgtggactattgaggactgttggaatgaacaatccaatgccaaactacccatgatctgtcacaccgtaagtccaacgcaacgggccgttcccattctctctcggtaaatccccgaggctttccaaatggcttatcgccggagctccatgacccgtggacattccgcagggcgcgtatcgggtctatcgggtctttgcatctccaatttccaatttgactctgaacccgtggcatgtttgactcggggcttaaaggcaatgcatgtgccgatgtatacccatgtccattctatgaaacaacagcgagaactagaatatgttaactgcaagggattcgttgtaagttgtagactacggagtccgctgtaccttgttatatatgttgtaggaagtgattaatgcacagccatcacacttcatgcagcatacatatctagaccatgacacaaaccctgtatgatgtcggcggatttttattcgtattatcttcggactattccatttaaagccatctgaatgactctatttcatatgaatcgcacgtatgttgcacattgtacattatagcgatatgtcaacaagtgtttatctagcttgacatattccgatccctacgtacttatccgttcagagaagatatggaaaatacacatgcataaaagaatgaagtactccgcacacaaaagaaaaagcaaagaggttgtccatgctccagctcggagatattcagtccggggttgttctcggaaagtctagcccagactggcatcgccttggcacccgtggccgaccccgggggggccagttcgatccttctggttaactcaacccatccccttgatatcatatcccaacacaatgtcgtcaaagaaagatatgcgcagagctgatctcggtgagtggaagaggaattgcttcgagccttggctcatcaaaactaacgttgaaaagtgatcccctacgtcgatccacccaagagcagcagcgatgcagatatctccagtacgcaccatcttcgttgtttcgacaatggcacgcttcagtgcgaggattatgaaggctgattgagctatgcaacaggcacaatgtcgagcactatgcccatggcggctgtaagttgtggcccaacatctgaccttgcgataacttgaccctgacctcgatctttcagatgtttactcggaaccggtgagtcgcgcatcttacacgagttatagacagtattgacgaatgtcgcaacacagcatgatcggatggtaagagcaaggcgagcagtcaatggtttggctaggttatctgactcggaaatagggtatccttcgtcttctcacttcagtcctggctgggtgaatccgcagagcagaagaagactgcttctacaccggcctacatgtcggttctcatgtcctgttcgtttctctccgtacccctcgtgtttgcaggactaatcttatggcgcgttatagtgatggcattggttgtcgtatgttttccgaacccactaaattgcgatgcgcccagcttaacaacccctttcagacctatttccctctcttcttgcctccgcaggctccagggggcaccaccggtgcctccgcaccgactccgctggcctcttgaacgcccgatcctccttgatatccacccacatacctatcataatcttcacgcagtcttatcatgtgaaatacaagaattaattgttcgcgggtcatcggattccaagtccggattgagagatctccacggttatctattgctgtcacgatgtagccatattcaagccgagttctgcccttgtgatcaggaatcagcctgtctccaccatagttgccaccaattatttgctagtttaaaatagatattgtatatgatttccccttaatatgtagttcttgcgcgctcctccaggggggcttgatgcgcgagaatcgcttagtcatacaccgcctaccccacaacgtgacccttgcctcaaaaggctctgccacttcttctctcgttcttcaaccacagcacctctctcctaaccacgcacgctccgatcttttacagagatattgaatctcgtccttcgctcactccatcaatacccattttaaacgccgtttactacgaaaaggccgagtttatgtccatcgaaaacctcaagaccttcggtaagttcgccaccattcccctcctgagcgcgtatcgggcttcaacccccacccgcacgcatatccacagctgtgatgactatgtatgcggatggcgacatatgcctttcgtcatgtgtagtgcgcgctgtatatttcagctctccccgcctgtgttgcaccgagtctcacgacggcgggggagagatttgatactgggctgagactgacatgtgcatattacagaccccttcgccgaagccgacgaagataccggcgagactaagcagtctcagaactatattcacatacggattcagcgtacgttcactctcctctcctcacctcctgtcctcaccgcccatggctgctcttgcgattgccggcgcttaaagggggggcacatgctaactccttattccacaacagaacgcaatggtcgcaagactctgaccactgttcagggtcttcccaagaagttcgaccagaagaaaattctcaaggtcatcaagaagaagttcggtatgtctcgtgacctatgcatacgtatgtccgggtcaaatgctaactatatcctagcttgcaatggcaccatcgtctctgacaccgagatgggcgaggtgattcagctgcaaggagatcagagaaaggatgtccaggagttcttgactgacaaggaggggctcgagcttgatgccaagaccatcaaggtatgtcgctgccccaatacgtcctccgtcaccattaccagttctaatctgtcatattttaggtccacgggttctaatcccatcaccaacatcatgcctcgttcccgtcccctcttcccggtttatgttgccctgtgagcggtgggataggaagcatcctcatccgccggccgtatacaatatacatactggccttcacatcgatcgaatgtcttgctttctccccccaccactctgtgcctggcgtgttagacctgggcccttcgtcgacatgacccgctacaccagtgtgcccccgcctatcgttgtcacatgattagcagggagcggggtggatcgactgctattttaggacgggattatgacggaacgaggagttggtagatacccaatatctgcatagacagacaacattttttttatcggcttgcgtgttttccattcttttatccctggagaaggggttgcctttgcttgtattgctaattaccattgcattcccatggtcaattttgtcagtctggctaatcgaggagatccaggttgaactaatggcgtgctattgctgaatcgttttctcggtctctaccgtctacttttaatatttgtgctgttctcgctctttgttcttgcgacaaggaaattgaactgttctcgagtatcatcctccagctgatgcagcaacatagagtaaattcgagataggaacttgctctctcagtctatgtttaagagggtgcgcgttgtgaatcaatcaataaacaaaaataatagataagatctatcaaagatcgccatgtctgaaaagaaaaacttccctaggccaggggtatcaagcgcaacaaagtactcttccagtacttttgctaaatcaaaatcacaatcagatcccaaaaatgtacaaatcatgcagcctgccagccaataacgcttgcccaaactgtggaaaccaactctgcagaatatccggaaacagaaaaagcaacaaaagtccaacaaccaacaggcaagtaatcaagctatagctctcccataggaatacggtcatccgcaattcgcatgcgcaggaagatggccacagcccagtcccaaagtttgcgggtaatgacgaagacaggcacttctggttcgttttcacgggtcagatgcagctgcatgaggagcgaggacatgcttaggaagcttgcgacggaaacgactagtagcgatgctgctgtttcgcgtttgatggttgcatggttttgcgttgcgtggtaaacaaatgttaaagactaggcgaagggtcagtggctgttgcaaggtcgatgaacaattggaagtcaatgtaacgtacggttgttatggagatccaggctggtaaaaggagtctagggtcagaggatgcaccagataggtaaaggacccaagaagtgatatatgcaatcaaaccgttagttgtaagaagacgaatcacaacggctggtggtgtgtagtttaaaagcctgagtatatcacagattagcattatggacatagtgggacgtcaagggttgagaaaaccaaccaacgggacatcatgcaatcagcaaagaaataggaaagatatgcggatgcacagcactgtcaagtagtcagtataagagtaggccgttggaggatagcatatcaagggaatacatacccacataatagccaatgccacctctgtcacacgaaatctcctctcaacatcccattcctgtccaacactaccaacaatcgccgccgcccacccctctcgtcccatacccggccttatatgcagcaattcggcgaggaaggtaaaagcgcatcgcaaaccccaccaggcagcaggaagcgtgctcagagcccgacataccagcaggggaatataccacctgcggtccactccgaggatgacagcaacccgcgggtgcagtgctgacttggggccatcgctgctgggtggagtatgggacgaggaagtcggggaaggcgggacagtcgaagcagatggagaagccacctctttaggcagtcggctttgtagtagttcgggggaattgctgaggtagctgggcggacgagccggtcgcgtgagattcaggtctggagcacggtgtggatgttgtggatagtctcggggggtgtatggtggaggagaggcattacgtcgaggaggagccagcctttattctgaatcgcggcatatgcggccgccacgcaaggaagggaaggggtataggatgagtattacaatcgagtcgtgagctctcgacaaaagattcaaaattgggttgttgtcaagccgtttgcgagtcccctaattggcagatatcagaccccagtgtgtggcgggcggtgtctttttcggaggcagtttaattttatatgctcgacttcgttttacatatgacagtgggattgaagaaacagcgaggaagatataagctgtagcctcgataagagggcgcttcgttcacaagagtcccggggagctacttgttgctgtcgaccgcagtgattcacgtgactgacagttccgcgggtttcattcttcggcgaggaaccacttctcttactcaacctgcattgcaatggcgtctaccataagattgcccgcgggcacatccgctcggattgtcccatctggttcctttgtacaatgtcgggccttctccgagacctcccaacaatggcgtgggagacaaatgaacttccgtcctccaagccaagtgcagcccgccttcaaaaccagaacccagggcatgagaatagccgatctgccaaatgatatcggcatattaccaggtacctttgtccgaccgttgtggagggacatgccttcgattttcaaggcaccgcgtgataggtggcatatggaatggacatggctcaaggcctggctgagcaaccatgccaggttagttatcctcgaattctcggactgctcggtacgctctggcggttacgctgatcaagagctgcttatgctatatacttacaaagatgtctttcctaactatattccagtctgctccaatactgcaagcgcgaaaatacccttcctcttctcctaggcaagcggcgccatttcgccgcaaagcttcataatgatgcgtttacagcatttgccgagtaagcatgagtcttttctcccgtttaattttcagcgggactaaccgctatgaattgttatagaggcaacatccctaaaatccgccagatctgctgcgacaatctcgccaagaacctcagcacagctatcgaacgccgcccaaagaatgagcatttaacctggaaactggtgaaatacctgcgtaagcccagcacaaacttcacgggtctccgcgtcatctcagatcgcgcaacatccatccccgatatcccgaaatccggcattcgtcagattgttgtgcgcatcacgagccgacaggctacgactcggacccagaaatccagcgggaagggacctacagaagatgtcaccgtcgacaagaaggagcaggactgtaccgagcacgttgtcattcagcatctccgctggaacaaccaggataagggctggagagtctggggcaacatcacccccaccacattgcatgatgcttggactaatccctacttcatgcctgggttgtcggccctcgagcgtctggacatgatcaaggactcgatgggcaagaaataaatttaagtcgcatctcaaactgtgatttgtatttctttctgtcagaatgatatctgcgcatttggaagactgcgactataagatccgcacagacgagactatgaccggccaagggttttctgacctaccatttcattcgatcaacagcgaatgggtttgacagaatatcctttatttcaccttcttgtctaacaactcctcgtttgggcctaacattggatagaggctcaggtcagcttctcttctggtccgttctcttcctcgccacggaaaacccttgatatagaagcatttacacctccctatgtaccatagccacctgttttgataaattctacctctttttgagccgttacctgtataaatgaatatcaatctctcaatctccttcctgtgacctactactttccctaccatgtactctctggatttaagcttctttggtacgattgccctgactctagaacaaataccaccaagaatatgcggcgtcctactactggcagtatactgtatactttctaccaatgtaataccaaatacgccaatatatgcattccaacctgacatcatcggtaacacgattatacgttgctaaagtcaaaactaaggactagccaggatgtatatatacaatcggaaggcacaaaagcagtttttaacgtgtagcacaggtatcactccaagaacacaagaacaagaacaagacgtacgaatgaataagaaaaagaggtacaagagagcaccgggaagcgacgcatcatcaaaacattatacgtgggtccgcggaccaacgttcatatcccaataaagaaacaataaagaaactaggaatgggccgggggcgaattgatctaatcgtcgtcgaagatctggaatgtgttattcaggatcgtctcgacgacacggacttgccatgcagcgtcggcgatgctgccgccggaattagcgcccataagggtgggtctatagcgagagttagcgagtctgtatctgatagcatcctgtttatatatgtaggatgtggactgtgcaaggacatacccgaagcaaatggctagattgcccgcgttcatgcggttctgggtatagtgttcttggatcttgttgagatgctgtaatagactgtattaatatctgatggaaatagagatcgtgttcttggggatcgtaccagaatgatggcccggagggtagcatagtgagcatcgggcagactgttaataagggcgtgcatcgagtctcggcgttggatgtcatcgtcgaagcctgtggtttcattgtcagtttctcaatacgggattctcttcatgacgtgaacgctacttacgggcggcatcgacaaactgctgatagaactgagtagtgaacagagggtccggaaggtccctgaagaattgcttcacaagtcctgcaacactgttgacatcatggtaaaagttctccgggtttgtgaagtcgacttgggatgagtctgttcatgtgaaattaggttagcaagctgcccatctcatcaactgtgcgatcaagcttaccattgtcaaagatggctttcatgtgactgatatgattagcactacccgagagtcggtagatgccctccatatccagaccgaacagctcgattgcttggaagcactggtacacaatgaacggaactgccgttccatcccgggcgtacaggtcgttcagcgaaacaccgaatactggcttcaacggaggaagatttgattggagactccggtccattggaggaggtccggccattggcaccggaatcatgggtgcaggttccggagcagacggtaccgacactgggtagggagctgtacccgctgggggcggggtgaaggtcttctccggctggggagcataaggtgtctgtggctgtggcaaccgatcaccgctctgcggtggctgaaccaccggcgaggtgacattattcgaggtgaatgccggcagtacggttgacccgcgcctattttgagtcgttggctgcgaagctgccgcagacgcagaagaaacagacccaccaccaccgagtgtctactcaatgggttagtatcgtgaagcaatcgagggacaatgcaggacttacagggtggcgctcgtatttgacaggttcggaagccacagcccccgggttgccttcatggcttaaaataaactcatggagatctttctggttatcgacttggcgaacaacatcggcaaggctcttaagtcctaatgccccgctcgcatcggtcttcaatgggctgacgcaaagaccttggcccagaagcagtttctcgctgaaagtagctgcaaataataagccgatgaactgaacaagaaagccacctacgtaggaaggaattgcacataccaaacttctgctgctgcagggtcaagcccgagtcacattcagcgatcaactgctgaagattgtgtacagcctgaggtcggtgcgtagacaccagctcctggcgcgccgtctgcgccgcctgaaccttagacccataatcgctatccgcgtgctggaccttgcgcaacagctcctcctcgtgctgcgccgcagacttgtggcccttgagaccgaactttccaccctgcttgtctcccgtgcgcacacggtcatactgctccgccaacgactcgtacttggcctttgccttctccgccagcgattccgcatcgacgactttcttctccgcagctaaccccgtctgtttccattgcttgcggccgcgctcgatgttgccggcaagctcgtgcaggtcgtcggacatctggtggagggagacggcgaattggaggccatggtcgaccattcgctcctggattcggtggatgtccttgtagctggaactgtacgttccttgtcggttgtcggtgcgttgcgccacatcgctgatcacgcgggacagttttcgcagcccctgagcgtgctcttcttcgagggagcctcgctttttcaggaaggttgagaaatcctagtagatattgtgttagcattcgcgatcgtcgcgggagtcctttcgcgactactaaccctggcggaggccacgctttgcttcagccgtgtcaggagtgtggttatcccgatctactcatgattaatataattgcgtctttgtttagtatgcacctgaaggtggattctttgtgtctgctcacatcagagtagataactttgtctaggcgggctttcagctcgtctgagatggcctcgtgggtcggctgggtctgctcgcccccgtggctaggggatgaacgaccggcgctcgacggaggcgcatcatgcgttaacgtcgaatcgtgtagggcttgatccgacatggaaagggtcttgactcgtgtgaatgtcaagagagagagttaaatagaggggggtgggacggaaagcctcacgggccactattaatggagtggcagatcaaaatgaggtccaggcacaggaacagggaatgctgcagccttctgcagtctcaattgggctgaaacgtggtgaacctggcggaatgtcttagtattctagtggtgttcttggggtcaagacgtaattgcgggttcggccaagtggatcttgggcttcattgtacgtatggagtgacctcagtgtacgtggtatggtgaactagtgagctctgcgtatttacaagcttaatacacaggaaaaatcacttttattctggtatcgtcgctagaatcaaatatcaacatatatacaaaacatccatgccagtaactcgcatctacaaaaccggaggtgcgacgaaagagtcgggaataccgtcaaagacccaattgagagaatcaaagacttccgagaacccagattcgctgaaaaatgctccgccttcgtcaaactgagctggcatcatcaaagattgatcctccagggagctatcatgttgccgcgtcatatgtcctgacggacctagtatatcttgattcgctgctatggcggcagctgcaaaaggagattttgttaacagccgggataaaacaaataaggggggaaaaagcaaagaaacttaccttgcatctcttcgaggcttctcaccggtcggaaccgttgtcgccaacgccaaaccgtgtcgtacacatgactcatgctcatccggcagcggactttaagctgtagggcatcttcttcggcaggttctagactcgtggcattccacatctgagcgagaatgtctgcaagacgaatgggacggtcgtgatccatgacacttattcggcgaattgctgagatcgcgccgttgaacagtagcttgccatggttgaaatcgaggtgtctactgaagctgctcttcaacaatttcatcagagcgaaagcagccgacacaatcatttgaagaatatagttggtggagtgaccgatcaattcgcctggcgatgtttcgagatctaatactcgactaaggaaggaggttgtcgcaaggaaaagcttgataagatcgtcacttcgcgcagtggatcctaaaaacatgaaatatcggaagtgtagttctgcagctcggagatggatcgtattgattgcttggaactagtgtcagcgtgccaaattggaaagatacgagattaactcaccagagatctttccttcaaactcgacatccatgtctctgagttcgcattccaaaacctgcacaaccacgagcttgtcggcgctaataaactccccaggttcgggtttactactgtataacgcctttgtcacccggtcgcagaacttctcgatacgcaaccgaatgaccaggtcttcaggaagtcggtagtcggcgtccctcaaagaggcaggctcaagggcccagtcgtatattgtactcggtggctggccgtaaccagtcgcaacactgccgaatcctaaatcagtctatgacaaacggccatataaaggaaacacccacttttgagccacgatgttacaaatgacccacgtatgtagtcgatcctttagggcttcaccttgaacttccatgcggaaagttgtgaactcttccgcttgaaccggacggtgtagcccaagctgcatggcaatttgcatcatcaagccactgagcatgaaggttgcatcggtgcgctggcttgtagtcggaagtggccatgtacacagaacgcaaagggccttgaccacccggtagtcttgcgggacactagtaatggttgcccaaagcagtctgctgaatggtccggacagtgcgctcaagagcccaggctcatattgagaccgtcgactcgcaacacagatcatagtccacgccaaaagagggcatcgattgagatacacctctgggggcttgggtggattcaaaagaggaagaaaggggtggtaataagtgaagtatctatacagatgtcaatcatagaaacgggccaagtaaatgggtagtgcatactgttcgaataatcgaagaactcgggctctagagagagaaacatcttccagtcgccattggccctcatcctgtgatacaatagaaccatcccttttcatagtcaaaggggttgctatagttgaatgagattcaattggcacggagacaggtcgagattggtcaatcgcggccgagtcacggcgagcaaagacatcctctgagcaatgggacatttcatcaccaggctcatgagactctacaccttgctcttgatctgaattgggtcccagacggcggcggagatcagcaatctccttttccatttcagcattgcgcctgtgaaatggagtcaataagatgagagagaagacgaaaaccagacaaaaaaagttaccttctcttagagatgcgcttgaacgactgttcaactttacagtctatcccaagccggcgacagcgcgaacaggccgccgctggcgtttgaacaatatcacaccgcagctttcaaggtttagagacatcagcgcgattgtcggagaccggatgcggttggggttgattttgggtaaaatcgcatagtaattatatgcacatgactcaccttttgctgcttacattcattacaggcttttcggctgccacctcggcgtttgcccgtgacaggcggagccttctccatctcgcaagattccgagcttgtctgcatgaaatcgataaccgggggtggccggggtagagtgggggaccgaaagtcggtcggggggattgaatagtgcggcccatccggtgccagtatgttccgataccccaaatccatggagatcagcctgcgttcagccggtataaaaccccacgaaacgtgaacgagtgctcgcggagtccatctgccgtaaatcggagaaatcggcccgctgaaggaggatgtggggagcctgtctgccgattgaggacgatgatttgcgggaaagttgacgccgagacgaatgtcggcggttgctgagtcagcgggtgcctgaggcatggatgatgtaatctttccatgatcccaagttttaagttacctagtcaggtagccctagagcaggttgagctgagcacgttgttaggcataggcatagggttatgtattggatagatacaccatcttctgcatagggattatacttcaaagactagccaattgctactaagcattggagagttcatagcatccatggatattgccttaccgccagaagtatataaacaaaacactgaaataaacaaaatttaacttatattcaagtggagatcactggatcgaagaagtagtatctagagttcttaagtcatagccgatattccaatagtcaagccttatatatgtggacttcatgccccgcttgccatggaccgaggtcgatgtggattatttgattatatgatctgcattcaatacatttacatatttaactccttaatcctttgtttctgcaagagttatcattccaatatctgatccaagatacgagtgtataagagtgcgttgtcctacagtcctcctgctactattaaccaagactaacaactcaacccaggcatcaatcatgtctgagatcaacgccaccgcaattctcgttccaaagcctgagaaatttgaagaagttagcacagccccatactctttgacagtctaataatctaacatgtcgtcatcctctaggtatctactcttgtagccgaagtcatcaaacaggtggaagaacatgaaccggacacactgctttactacgcattcccaatcaaggacaagaatgagattgtgatcgttgagaggtaagtcaaccagcctgtataccgtggataggtcgtctcttggtagctcccccgcatggagaaagcagatgtgcctcggtccaagtaccttgccgtccaagattctgatcctccaatatacaggtataaaaatcaagtggcgatccagacccacgtcaaatcaccctatttccgaaccttcgcagggaaattatccactttattgacgaagccggcggagatcagggcaggtggattcctgagtggttcgaggggcgtatcgcgactgtagttggttgtatctgatgtctgggggtggttgggtcgatataaataggatgcatcaactcccagaatgattcgacattgagtcggccatgtcccgtcactcgtgatcgacttgtcatgcgattggtgcattagtggtggcggcccagcagatatcgggaggtctgtgagatatttaggagcaattcggccctatcagacgaagaaccgacgacgggggcatagagcagggtattcacgaccatatatcctccgtactttgtatattctcgattctgatattctatttagacaccctcagtgtcaatatttagaaaattaagtggagacggactctttttcttcagaaaaagaatcttgaccttggctaggggaactagtccaatcacttttcccttttttcccctttctgcctcttcttcctcttctttctctctatatatgttttgtattgttcttttggtgagttccaaatcttccttctgtctccacacctctcccaccccctcttttcccaagctccagcctcctagcttcttcccttcgagctgttccccccctgaagctcaagctgatattctgaagatacccttgccgtgttgacattgtgtccttctaccttatcgctgccatccccttatcgcccagcccctgttgcaatctgccttgatctggcctgattcatacttttttttttgcgacatggcgtcgggtccggctactcagtcattgaaggtgagcatcggatcggatcagcgatgcgcggcgtgaattgacagtctatctagtgtgtggtgaccggtgatggtgcagttggcaaagttagtataatcccccgacactatccctacttataacattgcaatagatgctgacatccattcctccagacatgtcttttgatctcctacacaacgaatgcattccccggtgaatacatccctactgtgttcgtaccctctgcccctcaatgcgaaaccttgaatcccgaacggatattgattccataatagctttgacaactacacggccagtgttatggttgacggccggccgatcagcctgggactgtgggatactgctggacaagaggattacgatcgcctgagaccgttatcttacccgcaaaccgacgtctttttgatctgcttctccatcgtcagcccgccatcattcgataacgtcaaagcgaaggtacgaacggggacatcccatactctttctagtttcgtgcgactaaccgttcccccgcttctagtggttccctgagatcgaacaccatgcccccaatgtccccatcatcctcgttggtaccaagctcgatctgagagacgaccgcgccactattgaagccctccgcgcacgcaagatggagaccgtctcctacgaacaagccctagccgtcgccaaggagattcgcgcacataagtaccttgaatgttcggcgctgacacaacgcaacctgaagagcgtgttcgacgaagccatccggtgagtcttcatatcctttcccggaccgcttgtggatattcgttttctaactgtctaccacagggccgttctcaatccccgtcccactacgaaatccgggaggaaggcagtcaaatgcaatctcttgtaaagcacgtttgtttggcttgactcgtctccccatgttctcgtatgctacaatgagtaatatagtgttaatacggcgtctgggtagttagaggcctttttttttaattccgccggccgcctctcagtgctgttttgtgatgaaatccattgaccgtctttcttggcgatatttttgtcgttgcctctctcggcttgttcatagtctgtcccaattctatcgcgatgttcttgattccgagattataccatggtcgttctaagttattatttcatgtcataaatgtccactcgggcaatgtttgggaagaaagcacagaaaagaacatatgaattggtatcttcaaaatcaaaacaatagagacatgaagtaagtaatttttggaatacataagaaaaaaaccagccaaaccagatgctcccgggaatgcatggctatcaaaatgtccagctgcctgcagatgctccggacaccttgctgtacactgttccaatccctcaacgagttgagaccgttccaaataagccacgacagtgaaccagcgatttttttgatctacatccggcctctgcggctagggtgcagaccagcccactgatcgttgacagcgctgccagcgttgtcggctgcgccatccaggttagcagcattggcaccagagccgccagccggggcagccttcttctcgtgcttcctcttgtccttctggatatccttagcctggcgctggcgctcctcattgagcttctcgttcttggcctggatcttggcattgcgatgttcggacttggcgccgccgccaccagcactagaattgagggttagtatgcggctatgactgcagttgcttggagagcaattatattctcgaattgggggtaactcacgtcaactcgacgttcatgcgtcggggtgggtactttccgtcgtcgaagttggagtggtggtacaacttgagacaggtcttcatgcggtcgtagttgtcaaactcgatgaatgcgaaaccgcggcacttcttggggtcttctttcttggttgcgacgcggattgtggccggggggttcttttcaaagtgcttgctcaaggactcatggttggcggagtagggaaggttgcctgtatataggaatatcctttggttaattctgcgtctttggttcgggtagttcatctggattggaatcacttaccgacaaagcagatgaagcgggaactcttctgggcttgctcgccctccgcagattcagcggtaggctcttcttcggtctcagcagcgggctcggtcttctccttcttctgctttttctccttcttgtccttcttcttgtctttcttctccttcttatcgctgtccgccttctcggcggggatcacgtcaatatccatagcgtcctcggagggagcagcaggctcggcgtcggtctcctcggccttgcgcttctccttcttctcagacttttccttcttatcggacttctccttcttgtcagacttgtccttcttctcggacttatctttcttctcagatttgtccttcttgtccttcttttccttcttctccttcacctcttcctgtgccggagcagcagtttcagcgggagcgacaacctcggactcctcttgcgacttgcgcttttccttcttttccttcttgtcttttttgtccttcttctccttcttcatcttcttgccctcgggctcgacgacctcatcctgcacgagtttgcgcttatcacccattgtgtttgtttggagtatatattgtgatgaaaagagtcaatgataggatgcgaaagcaatcgggacgaatgaaagttcgggtaatttgggaaaacaagaaaaagaggtggagaactttgcagcgcaacgagactcaagctccaaaaaaaaagtcgggcggagagaaaagtgaaatttatttttgccgtgtctcggaaggcggtcaaggcgcttgctgataagcccttgattttatagttcgcaatttatctacttactacaagcaattgtttgaatacgatcattcaagtgtgcatttactcgaatcatatactagtataaagttcgtgaccagcgctctgttagatcagaacaccaagatcttcacacccttcttcaccccatagcgctcacgcagttccggccgagtaagcagcttcaacagcggcatatgcgtgtccttcatgtcaaagatgcctctttgcttctggtcaatgtgcgatccatcaatgacaatgcgctccagttcctccaggttgagagttcctagaagatattatcagcatctgtatatgtaacgaagtgagctatctacagatagcaagcaagaaaactcaccagactcgatcaaatctgagattctggttggggttccagccccgataccagaccgagcacgttgaaggaactgcttcgcttcctccaacttgatgtgtttcgcgaacagctttcctacaatgctatccttggtttggaaagagcgcagtgccctattaaccccaattgtcagttccggcttcgattcattccagaaaaaaagactaaaagttgtccacttaccgtacaacatcagcggctcgcatagcagcacccgaaataactagtgtatgaggggtgccgttcttctcggacgactttgacaggtcggcacctttactgaacgatttgaggaattcggggagttgctcgagctttcggctggaggtgaaggaagaggtatcgaggaatgcggaatctatagattggttaatgtctagaacactcctcgaccttggccgacagaacaagaggaagtatacatacctggaatcgaaagatcactcagttcaacagcagaaagctctttttcgtgtcttttggctttctgcgcaaagtgatcgcccaacaaccggccgtccatcttgccaatcgactcgtcaatgccgtctttgcgtgttgactgatgctcatcgtgttccgcctgcttctttttgttcttgttcttcttctgcttcttcttgcttgacccctctgcgggtgtgcctgcttcgggcttttcttgcttgagagcagcgtcgtcggcttgtctcttgcgcttgttttggagcttattggaaagtccttggggggcgtttgtgtcaaccattgtaagaatagcctgtatgaactcggcaacaaaatcttccgagtattttgagcttcaattagtaaatgcaagtctcgaagacttcattgcgcaaaaaaaaaaaccggctgattcagccaatcttatcgataagaaagggccaatcatgcactggcccgcaattgttgtttctagacgcgacagacaaacatcgacatcctgtaattcaccgtttgcccagctgatctgggattttattgtggtggggatcccttatgtggtctattatattgtgcgtgatatagttgcacctatcttgcagaaaaaaacaagccatgtcaacttctacacccaacgcgcgtggccgtcggtcaccatttgggaccgctaccccatctggggaaacaacattgaccggagtcagtgctacccatcaccatttaagagactataaattgataaccctattatctccctacagcttcaacgccttcctatccatacccgataccctcttacgccaagtcgacttgtcaccgcaaccaccccaggcacccaacggtccgcctctcgagatacaccacgccctcgaggcgtgggtgctccagcaacgccacatgtaatccgtgcccggcaacaacgagcggcgaatacccctggtcgggatcgccgacgaagcggcagagtgcagcgggagactacattcgatattctcagaaacctgggcaaaggtaagagcttcgccacgtatcattcgacatgagaactgaactaaaatacttgggttgtcctagcgctcgctcctgtatctcaacctatccgatcctcgccgcaggagaagccagagcctatagaggagccaattgatgaatttgaacagcttgataatgagccggaaatcgagcgaccacggttatcattgcctattcaagagtctgaggaagaaggcgatgaagtcagtcctgaaatgaaccccccgaggatgtctctcgccttcgcagaggaggatatggatatgacttaccggtctgtcgaataccctcgcgacgctagcgtcagagaccgggaccgtttatctatgatgagccgagctaccggaagaatcagtggagatttcgacgagacgagattagagagcgatgatgcagacgaaactggtattgtgggcgaggatgatgaggcagaggatacaatgatgagtgggggcgactttgatcgagggtaagaatacaagagttggattttctatgttacaagtaatggctaatatgacaaataggggagagacggaagacctgggtcgcttccactttgatcttaactttccatctcctgcagctgccccgcttgaatatcccgctgacgaagatatgaacgatatggagggtttcgaactgtccaccgcggagcaaccccaagctccatcagacgatgatgatgacgatgttggaggtgattttgggtttggactcgagttcccacccgcagcatcccccagtgagagccccggcatcgttggaggtggattgcgagatgaagctatcccagcccagggaaagcaaaagaagatttcacgacatggaattcctgtcccaaacttgcctgcaggtgtggtaaaaaagctagcgactcgcttcgcgcgttcgggggctggatcaaaggcaaaaatcaacaaggccacactggccgccatcgagcaagcgtcctcttggtactttgagcaagcaagccaagatttggctgcgtattcaaagcatgcgggacggaagaccattgatgagagcgatgtcaccacattgctgaggaggtcagtttcaatggaagccaaccagcgcatgggagtaattgctgacttgttccaggcaacgccatattaacaaaacgaccacagtgttttcccttgcccagaagcatttacccaaagaacttcagcaagacatgagattgtccatgcctccatgaataacaaatttcccatgaaaagtaacgctttcaacgccaatgaattatgctaaggtaaagctggaatcccactagattaccagtttcggttctggcgaactcggcgcagtgcctcgttggggttcttccgtacaaccatccacatcatgatggtcgtggccaaagacaggccatacctgcaaagtatgagcgacaatctcgaatgggagggaaaagcacaacggatctaacttaccaggtgaagatgtattgagaatggttgtttctcaaattcacctccgcggcgcggccaatcgggatacccttagcctcgcgatcacaagactcgaggaagtcaggaactagaaacgcaaatcaatgttagccatgaatgagcaagattattcaatataggctcattacccattgtctgctcaatccaaacaggctggctcccgctcttctctgccatctgattgatatccgggaagtagaacttgccctcgtccggcttgttatccggcgtgaacatgtttttcttccatggctctcgtagtaaaccttccacggtcacctctccatccggtacacccaaaggtcggtccttttggtccttcaatttccttgagatccaaccccggttcacaagtacggtgctctgtccctctcgctcgaggggagtcactacgatgaacccgtcctctccttcgttcatgcgggggccaaccagcatttctttgtcatgacggaaatggccggtagcgtacacgcggcggtagtcgaactctgaaatggcatccgggtcgactcgcggcggcagtggcagaggaggtttcacgagacggtcctcgaatttggccattaatttggttttccagcccaaacgctgtacctgccatgttcccaggataaatgagattatagggatcagagctatagtgtagaacaatacgttagtaattatctctaaatatagcatttccgaggatatgtagcattgaacattaacatacccaagatgatcagaccaggtccatgtttcttattaacacgcacaagccgcgccgggtggtctacaatattcagaccatcggccagctggcgtgattgagagatatggcggaattggtgtaggcggtatttggcgcagagggaattgatcttggatggtacacgagggtttcgaagagcgcgagtcggaggcgtccaggccctcgcggatgtcttctgcaaagcagagaagattggccgcatgttgacagtttagaaacgcgaagaatgcactcttaattgacgttcggatggggttggagttgtcgtttctgcaaatgcgacggcagttgggaatttcgggatcggtgaccgcccaggcttctcctatcgacaacattgtatacttgtcactccgcactggcgcttagtcttcacggaatgcgattatgacgattttctacatcggaggtcttcaggagggaattagtgctgcagtaagagatgacaaagtggttacttgttttgttagaggtcgctgaatgttctccccgcatcgaatgacatgttgctgatcttgggacttgaacatatagatgacgaggagttgagctctgaatgggaggaggactattttggtgatgctgaggtatatatactcactaaaattgaatgtcgaacggtatctgattctctacaggtcgtacaagcactccatgccaactcgattgtattgcgcttgacagcgggttcacaggaagctgaactcctggcctctttctctccgatccagaaggtcccgagtgttatcgttatcaagtgcgttcaaccgtccaaggccttatggcaagtcgatattagtttgctgaccgcgttctagcaatggcaagaatcattatatcgagccagatatcacgaaggatgacttccgcactcgattgattacagctttgaaaaaggaacagacaattcgtcctacacagcaagtacaaggtaatggtacacctacagcttcaacaaataatacgacggtgtcagtcgtgccacaaccccagcgtgaggcgccatccaatgccagcaattccacacaatccgcaaagaaagcaagtgaaattacaataaagaaacaatcaccgattggacaagtaccaaagaaagctgcggaacctgcaaagtcaacaagctctacatctcaaacatcatccaaagaagccagcaataaagactacaaaggcaaagcgccgatggggtctaagaatcccactgccaaaggtgtcgtaaagagtgaacaccaagagccaaagactatagtttctcggggacctccaaccgagtaccggctacaagtgcgcctgttcgatggaagctccgtgcggtctagcttcgcacccacccagagcatccgaaatgatgtacgagcttggcttgatgaaaagatggaaggcgacaaccgaccctacaacctcaaacacatcttaacccctttccctagcgaaactctttccgtcgcccaagaatcgcaaaccctccgcgacttaaatctcggttccactgcgaacctcgtcatgattcctgtatcaacatatacggaagcctattcggcagcgggtagcttgcccgcccgtagtgtctctgccatctacaacttggcctcttctgctgccaacaccgcaacgggttttgtgggttcattccttggatatggcccaacggcaccagcaagcggtgcaaccacctcttcggcctcttcggctactggcaactctcagcgtcctgggactacgggacccaatattcggacgctgagagaccagcaagatggacgtggggataaccagctctacaatgggaaccaggtatgtgattatgcgagatgagaatatcttgtccgggattggctaatgtctttctcagttgaatttcgagccacggaataacgaggatgacaaggataaatgagtcccagcggtattgcttcggtgttcttgcattatttatctatggcgttgatggatctgattagctcaccagcctctctatttaactatgacactgctattattcacattttggttactgcaaagttggcagtcacaataagtgatcttttccatgaagcctttactggtcctttccatcgtatttggtttttgatagaggtccaaacaatcatcagagaactacaaatattggagttcgttaaattcatgcattcgaattcttgattcagtagtcaggtatattgatccctttatcgaggagaggtggtataaagtacaaagaggggatatggaaatggctatgcaaaagaaagattggctcggttatggaacaagcccataaatctgtgaaccccatcacttattacgaagaatggtatctgtctttctgatcaaaaagggtcaaattggtatcaaccccttagtaaggcttagcggcagcctggcaagctttctgtggtacgattagtatgtattaaaaatgcaagaaaaaaaccgaagtgtaaacataccagctggtcaaggtaccaaccgcagatgctcaagttaccctggttctcatccatgcaagtgcggaagttgcggacgtcaacctcacaagcagggttctcgtacgaggtctgggcagcattgctctggtagaggccgctgtccataccctggaactcagaaggggcaggagcctgctgggcctcagcgggggcgctggagccgccgccgaagaagccaccgatggcgtggccgatagaggagccgacggcaacaccactgcatcggaataaaccgttagcacatatttcgggagagtcgaatcccaacccgggtcttgtcggggaatggatcgcaaagccgaatctggaacttacgctgcggtcgaggccatctggccgaaaagtccagggccggcgctctgctgctgcatgggaggagcctgggcctgaggaggttgagcggcggtcgagtgaggctgcgactgctgctgcgaaggaccagccgcgggccgagcaggagcggcggtaggacgacggggagcgctgcgcgcaggggcgggagcagaacgacgttgacgagccattttgttgtgtgtgggtttttttggaggaattagaaagggaggtgaagatatatgcaagttgggataagtatacggactagtggagaaagaagaagctagaagatgagtaagttcggccattgaggcaaactccgatgcaaaccgtggagttttctggacgttgattggctgacttcagtcacgtggatcggacatcacggtgccgattgcccggagcggagtcagcaacggggatactacgggaattactagcatgtgctattaaaagagcaaattatgtcataggaaggaccagtcggtttcatctgcttgtttgtgcatagagtatatcgcggagcttgttgcagctcccattccgaaagggtatcttgattcatggagacatacaagtctcgtacatagtacacagagccactcattgtggtctcaaaatggccgagacatccatctgaaggaagctcatggccgggcatgcttggcaaatcgattgctagattcgacaatgcataacgtgtcgacagaattccggtagtggtgaggcatagccaataatatgctttgggaatgcccggcagtccgttcttagggttcgaggcgcaagccggtccgtactgaattctcactaagatcggggtgcaatgcactgcactcattgcgcttttcgggccttccgagcctcctccttcttcagccgtcgctccttcttcttttctttcattgctgccgtgttgattttcctctccttctttgccttgctgtcttccaatttgtgttctcctttggatttcttttggctatccttctcggtcttttcggtgtggtttgtgtcaacccggggctctgctgctgttgcaaggtcgacgcccccttcagaatcgtcatcgtcagaatcgggttgcccgttcgtcgcctcaatgctcttgagggcaaacatggctgctttgagctgggcacgggctcgctctttagcctgcttttctgcccgttctaagtcatacttatcattgccagcctgtaaaaatttgattaatcgccattctatacaatataataggttagtacttacaaggccgtgtttgatgaatctgctcgcagctcccttatcaagggtcatggggcgttcctcaggctcggtctccagtgccttgatcttttcaaagtactgcttcacacgagtcagttcccggaacactgggtgttgcttcgcatccacgccatgaagccgcagataagctgtcaaatttcattagtaagagtaaatttgtaaaatttgtagtgtgacgtacagaagattaacgattctagtgtgtaggtgatcaacacgtgaagttttgctttgtccataacaggcaatttgtttgagtttttgagaagtgtgctggtcaaaagaggctggagaacagcctccaagtcatcgacattatcatccagctgctcaagcagcggtagtaggtccgttggatccatgacagtgagatgtgatgtagatgagaaattgcttgatctaaaaaaataggacggattcaactgggcggtgaggggagcggtgtggattctggaccgatcatcatctgcgcaactaagatcgctgagaactcgtgcatatccaacaattggttgattgttacgagataggccttggtggacataccagtggctgggctcttgcctatttgacaatatccatgacataaggatcgatacctcaccaaacccatcgctctaacctcctccccgtcgacaaacacatacttgcaactcaatcggatatcccggggagtttttcctcaacattctcataatgcagtcgacatttcggtctcgaactttgtggcgaaccggcattcttggtacatgtgttcggtcccggttccaggtctatggtgtgccaaacacacgatttatctcaacatggaaggaagagttgcatgaggtcaaccaggatacgaaagcccctctatcaggacgagttcacatcctcggaatgggtaatctaggttgcttctttgctcattctttagccacgagacggtcaccgccgcccatcacaatatgcttgcacaatgactatctctaccaggcctttgtccggaaaaggggacaaatttctgtcagcacacatggccttgacgatgtcagaacgggatttgatgttgaaacggtggacgaagaaggcagatggtatacaatgccgcctgttgacaaccggccctcgccattcaatccccagtctccgccggatagtggtcctatcgagtgtctaattatttgcaccaaggcgcatcacacggagcttgccattaaagatatcagtcaccgcttgactaaagattcgaccatttgtcttgttcataatggcatgggtgtgctcgattctatcaatcaaaatgttttccccgatcccaacaatcgaccacattacatccaggcagtcttcagccatggtctgggtaggaacgactcgttcaagatttcgcatttgggagttgggaccacaatccttagcccagttggagatccaagcatccctcccacaaacccggaagctgaccagacgtgggcgccgtccacaaaatatcttctgcgcctcttgactctcactccgccattggtcgctgtggctgatacaccggcaggtctgttacaataccaacttgaaaaattggcagtgaactgcgtcatcaatcccctgactgcactgagtgactgtaccaatggcgagatcttgtactcgttcagctttacccgtgtcatgcggctgctactctttgagatctccgccgtgatttgtgctcttcctgaattacaaggtatcccgggcatcgaagatcgcttctccccagaacgcctgcgtcgtttggtcgtgaacatcgcgagcaacacggccaagaatcacagttcaatgcagcaagatatcaaccaaaggagattgacagaaattgaatacttcaacggatggattgtacgtcgcggtgaagaactgggtatcaaatgcgcactcaactacatgatcaagcatttagtcgctgccaaagcagctacccatcggagccgagaagctggcgcgattcccctcgatctcgacaatgtcatctctaccaacgaacctcccatttaactgctccggactgccttcttctgtcaagtccttactctaccttggctccttgtcatatcgctgtgtgtgagcaggtcaaaggatttaacaacaatctaaattatttgcgggaactctatacagagacagttttggccgcatgatcgcagagctctttgatctgcttcaaccgtctcagcagcatctccgcttttgaacgatgtgcttgcactgtggtgtcgagttccatggtcttctgcagcgcagttatagttgcatctgcctctgccgcatatgtctgaatccacctcttgattgtggcctcggatcggctctcgtccaaaccctccgattggccttcaagaacatggttccgccaatccttctccttcatataactcagacatgcagcgacctctgtgcggtaacagggtccgtgtggagtgacttggtagttactagcgctgtgtcagtggaggactgtatatattgcgtagagaatgcgcattgtcatgtaaaatatcaatcaaaccacatacccatgatactgattcagccacaactcctcttgctgctcagcagtttgaatgtcccggaaaacaatatcatcaagatagatcgaatctgcttcattcacatcgaggaagaagccatctatagaaaggggagggatgaagtcagcacgccgaaggaaaaagaataacaacactttctcacattctgctagtaaagtatcattcggatgactaccatagttcatgaacacttcctcgccctcctcataatctttcgtagcgcgaaattcatatacactctcatcgaatctgacatcccgctgtttccatctagtgttagctttatcagtagtatggaattcagacgaagtacgtacagcaacatccgcatgattgaagtaatcagcaaatggcaccagccccatcgcatcattagggtcttccggcgtttcctggccctctccaatccaatagaagctcctcgtattcacgatcagccagttgtaggagaatgtctcccagttggtctccgggaaaacagaaatgacgtccgtccatgctttgcgcaggcgctgggcctgctgcgaaagaatgttctggtgatctgagctgtatttcctcgttttatggcctggctgtagagtattccagagacctgaaatggacggcgggagaagacttggctgcttcgagtctgtcgaggagtcgtccttgctgttgggtaactgcggtcctcccaggacggttggccagaggatcggcatgctgtcttcgaagtcttttcggctgggccatgaattgcgccattggtcgtattttgatagttcatctggtgcagcgtgtgtgagatacgctgctagaagtgcttgtacggcaatgtcttctgggagtttgtcgataaaggcggaagggatatcttcggccctgagcatcaactgtgtcggcacttggaggacaatttctcctttctaaacatatacttagtgagcaaatttcaaatgagaagtagatatagattcgaaggctcatagtcatactttaatgttccgagtggccatcattcccaacccacgtccttgaaaccgggctggggtcaccgagttgatatctatgccattggagattgcccattcagtgaaggcctcatgctcttctccgggccaccattctggcttcatattggcttcttggcagattttgagatgcttcctccagtcagcatatactacaagacagggattgagttggagagatatacaattgttagaacacaccttcagagtagtctgttctattatctcctgttccttcaaaccaatagcctagaaagaatatttagtagtctcaatgggcgtcgatgtgtgtctgaaattcactctacactgtggagcagaaggttatcgataaaggcgttatcgcgaactacggcagggcacgacgaccactcgtgccgtccctgccgatctgataatcgtaccacttcggctttcacttcagctttcgtcccagacgatgcacaagttcctttagctttgggattcataatgtcagtacttgggaggcgtggagcaattgagcttcgagccttggctaccagcccaaatctatcagctgcaagcactttacggcccttttccgtgctgaaccgcccaccaccaaactaccccggccatgtcccattgaccactattgaacgcggtgctcttgctataggctcggcaattggatcccttatcaaccctagaagagcgggtgcgtggatataatttcctacataactggaatagaatcttggatcacgatctaatttggtactctatagatctcattgcggccttgggcgaagccaccgccacaccattcttcatatatcgactacgcgatgctatgctctcagatccaacagggcgccgcattctccgcgatcgtccccgcatcacctccgagaccctcaaaatgacctatctccgcaccctccccgagaactccgtcggccggacatacgctaaatggctagatcgcgagggcgtatcccccgacacccgagataacgtccagtatatcgacaatgaagaatgtgcatacgtcatgcagcgataccgcgagtgccatgacttctaccacgcagtgacgggtctacctatttttgtagagggcgagctcgctctcaaggcgctggagttcttgaatacacttttgccgatgacggggctgagtctatttgcctttgtacggatgaagcccgccgagaaagagcggttcctctcgttacatctcccgtgggctattcgcagtgggctggggagtaaggagcttatcaatgtttattgggaggaggtgttggagaaggatgtggacgagcttagagctgagctgaatattgagcgtccgccggatctaagagagattcggaagatgattcggcagcagcagaagcgggaaaaagagagacagcagcaggcttcgaactgagctgggttgcgtcctgtcggggcgatgaaatctcgaatatagggagagatgtatgattattgaatcgttgtagaccatatcaccgatgcgcagatgcgcaaatgcgaggctgattgccttgaattcaacccagctgcaaatgtagaagaaaggaccataacgcctggagtagattttcccagtggccacgagcggatagcaagagaggtatccgaatgcaataaacaaaagggccataggcacaagtgatcatcgatcacattttatgcgacccttacaggtccaagagatcatcatcgtcatcccatccacctttgcggcgagaaatgacaattttgtgctcctcctcttcttttcgctggttctctgcaacagcccctagcagctccttaagttgtgcctctgttaccttggaccgtaactgtccagactgggcgagcatgatgaggcggttctcgatatcggttgcgcgcgactccttaacgagacggatacggcctaggcgatcggcagcgtcggggtcgaggatttgtgtcaggatcgaagcgcgttgctcggctggaatgaatcaagatgggttagatgcggaaatataaggacgtcatcgaatggtctaaagggacataccctcggcttgtctagttgggttcattagcatacagcatcttcttgcgacttattccaacacttacctcctctgctgtgcctgctcaccaccatcctgaccggctggaccacctccacgtcctccttgttgctggagttgcgcgagacgagctcggcggatctgtttctctcttagtaccggagccggaggatgcagacctctcacatgctatggtgcaagactgacctcttctagctctgcgtctgccatggtggatattcaaatcaagtgaggggcttggagtgatcaagtgatgaggaatcaaggattaattcggtgtaccccacttgggctcgcctgagtacggaggggtgggacgaccatacttcaatgttctctggggtggttttgagatagttatacaacaatttgctaatatatttactggcagaaataggaattgaatactgaatgtcatggtggtcataattctacgacttgtatatgttcaactaccgtctatatatttagtatagttgtcttcaacttcaccctctatagtagataattataaatttaaacgccacaaaagataataatattaaatagagatacgtagaaataagcagtgaataacaacagaatcattcaacactatctacatcgtcgagtacatatattcaatgtcccctgggttcggagtaagtctcctattgtaccccgtacctggggaattaattacacgtgggactggaatgttttaaattcctccgtacaactacgcctatttgtacataaccattagtctatttctctaattggctggcttaatggcctaatatcttactatattcgcgtggtcaacgctatccggcatgttgtgcgtgataagaccttgaagagtacttttgtagacgcgtatcacacagccagccactaacaacacggtaaattgggatccattctactgcgccttgaggggcaaatctcaggaaaaaaaaagcaaaaggcttcagggttagctccaaataaatcccccgggggctatcagacgcgcccggggtgtccgtcgttccgtctcccggtggcaatgctggatttaccctcacggtggccttcccctcacgcccattttatatttcatattcatatacaagtcttcactccctgtacaagtgcatacgacgtaagcagtcgatctttcaatctttcaataagcccacccgtgctcggtccacgggttcatatccgggtgactaagcttcgattcgccctcgcgctgcaaccctgacttcctcgacatcctcaacaggctgatatttccgatcagacctgtttgtggcgattcaatccttttcttcactttcaaacacattcctttctgttgtgtcttcagccgtccgactctcctcactccgaattccggattccgctatcttttaccctatcacgtacccccgtggacctactcgcacgcgcgaactttcgattctaaaacctgtctttttggtgtggatggcgtggatagcatcttgtctaccaaagcttttctggacgtgatctcgattattgatcttgatctggcgacgagcgatccatttcttcccttacatcccgaacgccttctacgtcactcaccatggccgagtaagtatccatcaagatttccgcgacttcaattattgacgctttaggtggggcagtttaattgcctttcagacctcgcatcatagcttcttctccccatccaaaatgatctcgcgcaactcccataagaggtcgctctcctccgagcaccggtccttatctcctgaccgaaccgtcacgaaagccaagtccaccaccaatctctccgagatcgccgctgccaatgcagcacaaaactccggatattacgaaagcagttttagcacattgcaagacccgcgattgctgatcgggtcggaggtctcgcattcgacgtcatcgtctcaccacccggatctgagcaacgaagtagcggcattgtctgtgaaattgatccaggctatcaacaaccaaacaaaccttgacgataatctggtcgctactcggcaagagctagagctggctcagggcaaaattcaagctctggagtaccagaacgagaaatatcggcgagatattgataaccaagtctatataaagaaggtcgactctgatcgcgaaatttcgcaattacgagatgcattagcagaagaaacgaccttgcgtctcgccgctgaaaagggcaggaaaaatattgagcaagaagtggaaactctcactgcggctctttttgaagaagccaataaggtcggtaatctcctttaacgtatgcattttgtactaaattttaacgttactttagatggtagcttcggctaaaattgaccgagaggcggtggaaaagaagaatgagcagttgcgttcacaagtcaaagataccgagttgctcctggcatcgcaccaagaccagcttgccgagctcaagtctgtcatgcaaacgatgaatcttcacaaagatgacatggaaggacgtcccgctaacagtccatcgtctccggacgagtcacaagcgcaaggttctaaccaagacactgagtttgaacccgttcctatattgattggcaacccggaggagtttaccccgggtccttcctctagcttccctcatctcctccgcatggtatgtcgcgcggatttgcaggcttatgaggatttccgcgatttgctggtactctctcggagctcaaaacctcccagtcgtgctgccagtgggtcatatggaggcctcaacgtgatgggcctggcaagctttgcgagtggagggtctccatcgtcgacctcatcacctaccaaagggtttagctactcccctaatgggagcatatcttccacaacgggttcgggattttccttgaaggaaactcgcttctacaagcgggtgcttatggaggatatcgaacctacattgcgactagatctagcgccggggatttcttggttgacgcggcgtaccgttctaagtggtatctgcgaaggcagtctcgtcgtcgagccaatgcccacatcagctcagaaattcgagttcccctgctctgtctgtggtgaacgcagacccggcacgtctaatgcgagaacccatcgtttccgaacgtcagacagcgagactgctcaaaggtactcactttgcattctctgcttagaaagagtgcgctcatgttgcgagttcactggctacttgcgtctcatccttgatggacatcttcgggctggggataccgaagaagaaaaggaaatctgggatgagactatccgtctcagagagaggatgttctggtcccgcgtcggaggaggcatcattccattgggcaatcgcccaagcgaaccggaggtgccggccagcacagagcctaatactggcgtccaagacgatgccgaccagtatctctatcctgtggacgttacttatctcgagcccaggacagaaaaagtacccgttgctgatcaaatcgcgccggaaacaccagttagagcatccactactgatcatataaccccccctgatctttctcgacctcaaagccctatgtatgacagggatgatgctgcttctttggatgacttgcaacgcaagcgactttctattgattcagcagcaagcgtttatgaagaagccagcactgacgtggatgccaataccacggcacctgcccccaacgaaccctcgattattcagagtcgagagacagacacagacatcgccaaacccaatggtttgagcgactctttacctcggttgatcacaagcgatcaacacgagtgagacgactacacgttttacacagcgtttaatgatccgcttaatgtcttcacccttcactacaccccttgacattgcgttcttcagtcacttaattttcttctatttcctccaggtcgttgataagacctgccttttggaaatgctgcttctgcttctgcttctgcttctacttctacttctacttctgcttctgcttctacttttacctctacctttaatgaccctttgggttacaccttgataatgttcctcatccgttctggctttttgggcatccttctcttcattttcggcagcatggcctactgtattattatcaacttttcgcttccaaccatgtatacataattatgcgttttgctttccccctttccctttttttttgcggacatttggaccaggtgcggcattgtggattttcactgtttctgttcttttttctcttttttctcctttttttctgtgcccacttttgattcgcggcaatgctggtttcgggacccattggtggaagttcggtgataaatgatagacgatttgaatcaaattgcatacaaagtcatatattctcttggaataatacacgtagaagatgcgagtaacgcatgccaattccagtcactaatgcctagaatcatcactacttcatacggaaatagacggatccaagtactaaataggagaacagcatggactagacaaagatgtttcatgaggttaagaataaaaaagcgctattgtacacaaataggaaaaaagaagctcatcatccagattccatccctcccaaactccacaaatggcagaaaagatagccttcgaaatagaaaacccgcgaaaacctcaatgcgaacgagaacatcccgtctgaactgtacgtagccggggaggatatcatttcttggcaagctggtgaatgtgtctgatctggtcttcgatattcatgctctgggggttgggagtggcgttcgggttctgtgggccagccgaggcatcgagacccgtagacagacgcttgcggcgagcttcctcctcggggtcgaggggagcagggtcgaagacgtcgctgcgctggctggcaagacgcttgaggttgttgaccacgtcgacggtggacagattggtggtggcactgcgggcttcggccttggcacgctgttctttccagcgcgggtcgagcagctcgatacggatgtgctcgtccagctcgttggagggcactttttggttgcagtaagggcagatccccatctgggcttgttgacggcgggcctgagcgcggggcacgtagtctgagcggatgcgcattggctgttggcctgcgggggcttgggctgctgcctgggcggcggcggcttggtcgcgcgcctgagtccgctcgcggatgcgctggtcttcggcagggttggtgaactgaccggctgcggggtaggggcctgcagggtagggcgcgactgcgggctggggggcgggctgagggacgggcattggtgctggtcgaactgggtaggcgttgtagtagacgggttcgtcaaggccattgggcatcgcttcatcgatacggagtgcgttgagggaaaaggacgctctctgctcgagggaggcggactgcaggtcattggcggaggtcggcggtggcaagtctgcgtggttgtcgtgctcggtgaattcaatagtctcgaccacgacgaagtcatgccagtcgatctgggcgtactcaatgcgttcctgttcactttgctgttccttctcttgcttctgttgacgttggtatttcacccattctgcgcgctgcttagcgcgctccatgacgtggaatttgttctttgcactttgttgcagctcttcgattctcttcgtggctgaagtcacgtcgtcgataccctcgtcgcgaagcaagatagtgtattggtcgaccaaacgcgtgaagaattggtagagactatgctgtgggcgcaagaagtcgaactgggaatttctggcctcgcgctgcgccagcgcggtcatgaatgacttcccccgcttcgcgacaaacatcgctgtgagcttcaccacctccaaatcctgcgcattgataataggcatgcgcgcagagaagtggaacggggatggttcaggtggtcctttgggcttttcgggttccgcagcggcgacagcctcgccagctcgtgctggtccgactcgacctgctctgtactcggcgatataccattgatagtatggctcgtaggcatctccagcattcaggaaagagaatttgtagttgttcctttccctctcgcggatacggtcttcgaagacacctttatggcgaacgacatagcttgctgtggtctcgatggctttgcgaatatccttgggaggaagaaccataccctctggaggcttgataaccccctcagacccctcagggcgaggtgtagttccattggatggctccatggtgaatggcaaggatatgaagagatagaggtctcgccagtaggaaagcaaatgatggatccaccatttcaccgccgtaaagagtggcattttgacggcggtgggagttttggcggtgtgtgttgtggcggggattggattgtggcgtgggctgtgggattgtggcgggtgcctcccgtgcacgcggccatgttcctgtgttctgcatttgtccacgggaatgtttactttctcttttttatagtcaattgatttctagatcatcttatatacatgtagatatctaaaagtatggtatttcaaatctacatgcgactggcgtactctgtagagcccgttaaaacactaggggctaaaaactaaggggctcacatgttgtcctccacagccgccgttgatctggcctcaaggcggaactgcacactgcacgctttcgtccatctgcgttcactccagttcttgattctcaactttttttttttctttcttactctctcttcaacagccaattttctttagtcttttacttcttccctgtcatggggcctttttcctcattattacacgatcattaattggtgtgctgtttgaagctattgaacggttgacagctcgaggtcgaacatagctcccgatagcatccactcgtccatcgaaccctgagaaacctctcattgacaattcaaactataactcaactacacgcaatcctcatatcgtttctcctcgacagtccgacttcgattcctactcccgcgccgttctcctgaaccgctgacgtcgtatcgaaacaatatgggccagaaagcgcaagacacgctggccgtgcggccacagagccgtggtaggcgctcgcccagtcggtcgcctaagcccaagaaccgcaagcctttggcggtgcctcagacgtatgcctcggaaggagtgaagaacaatgacatcttcaaactccccggctcggactatagacttattgtactggtaactctgatcgccgcagctgttcgcctattcagaatctatcagcccaccagcgtggtcttcgatgaagtccagtacgttccgcccaagcttgtgttttcaatcggaataaaaacaaacagagactaatgattacgcgtgaacagcttcggtggatttgcttccaaatatatcaagggaaaattcttcatggacgtgcaccccccgctagctaaactgctgcttacgctggctggttggttggctgggttcgacggaaacttcgacttcaaggatattggcaaggattatttggagcccggtgttccttatgtggccatgcgcatgcttccagctattctgggtgtcctgactgtcccattgatgttcctcaccctcaaagttaccgggtgccgaacttcaacttcagtcctaggtgctggtcttgttatctttgacaacgctttggtcactcagtcccgtctgattctgctcgactccccactgattttctttaccgctctgacagctttggccttcagctgcttcaccaaccaacaagagcttggaccggcctatgccttccgtggcccgtggtggttctggctcgtgtgtaccggtctttctcttggcgcaaccctgagcgtgaagtgggttggcctcttcactatggcttgggttggatctctcacggctctccagttgtgggtactgttgggcgattctaaaaatgtcacaccggtatgggtttccaaattcagatcaagccgtgttctatgctaacagtaggattcttacagcgtctgtggttcaagcatttcttctctcgggtattctgtctcattgtcattcctctcggtttctacatggccatgtttgccatccactttacatgcttggttaaccccggagaaggtgacggcttcatgtcatcggaattccaggcaactttgaactcaaagtctatgcaagatgttcccgcagatgtctcatttggatcccgggtcagcctccgccacctgaacacacagggcggctacctgcactcccaccctcatatgtacccaacaggtagcaagcagcagcagatcacgctctacccccacaaggatgagaacaacgagttcctcctggagaactcgactcagcctctaggaccctatggagaggtcgagggcccattcgcctgggataacctgactgctcctggtttcattgaggatggttcgattatcagactttaccatgtgatcactcaccgaagaattcactcgcatgacgagcgccctccggtgaccgaggccgactggcagtatgaggtctctgcctatggatacgaaggcttccctggtgatgccaacgacttatggagggttgagattgtgaagtccatgtccgagacccccgagtctaagaagcgcttgcggactattcagtccaagttcaagttggtgcacgtcatgactggttgtgtcctgttctcccacaaggtcaagcttccggactggggatacgagcagcaggaagtgacttgcgccaagggtggtactcttcccaatagcatttggtatattgagtccaaccagcatcccgctatggccccggacgccgagcgagtgaactaccggaatcccggattcttgggcaagttctgggaattgcagaaggtcatgtggaccacgaacgcaggcttagttgagtcccatgcctgggattctcgtccgccctcctggcctaccctccttcgtggcatcaacttctggggcaaagacaaccgccaaatttacctcctcggaaaccctcttatctggtggtcgaccactctggctatcggaatctatttcgtcttcaaggctctctccattgttcggtggcaacgaagttgtgatgactacaagcacacttcgttcaagcgctttgactacgaggttggcaccagcgttttgggttggttcttccactatttcccattctacctcatggcccgccagctcttcttgcatcactacctccctgccctttacttcgccattatggtcttttgccaagaatttgacttccttacaaaccgcattaagagcctggggcttgcgtcgaagcccttgatcggaaaggctctgatggcagtcttcctgggacttagcgttgttgtattcacgctctacgccccactcgtgtatggtaacccctggactagggatgcctgcaatcaggtgaagctgcttggatcctgggatttcgactgtaacacattccacaccgacgtaagtgttccggaatggaaacctcctcgacgaggttattgaacgaatcgacgagatcacgactgacataggcctttcgaactccactagttgagccagtacatcactcagtacgtgccgagcctatcccccgtggctgcctctacaaccgcagctcaagcaccacccccaccgccaccagtccaggctcaagagcctgcgcctgcgcctgcaggtgaggctgttcaagaatcagacccagcggccgtcaccgcgcccaagcttaagggctctgtggcgcgcgttgagtaccgcgaccaaaacggcaaagttcttgacgagaaccttgtagcctcgctccgagcagaaggtaaagtcaagttcgagactcgctatgaggctggtcatcctctggagaatgcccatgaggttcctatcgtcgatggccagctcgctcccccgcacccggatgtgcagggccagaatcccgagactgccagcgcgcccgaagacatcgtgccccctgagagccccgcatctgtggccgatggtaacgagcgctccgtcgagcagccaagctccatggaagccaaacctgccagcgagggcaatgatgcgactagctagtggccggaagataaaatgtaagaggagagtggattctgccatgtataatgagactccatagagtacttgtccatttctctagtcaatgttagcttttttttagtgttgccacaattgacagtaataatttttgctatataaaataatattaaaggtagtcagttagctggccaatctcagcgcttgtagctctggtttgtcaggtatggttctagattgctaattcaaccttgtaaccaagccagcaggatacggatctaacggaagaaagagacatattcccaattgactctttatctgaatacggatactatgcacaaatctcttgctatccaaatggcaagttcacgcagccctctcctctccccggtcttagtgtacagcagccggccgcgggaagcagcggttcgcttcattcgacttcttaaggcacttcttgtggctaatcaatagccgtttagtagtcccactcctccttgccgtacttgttgaaccgctcgtggaggtcctattagaaagaagctaatgtcagcatttactaccaaaacagcaacgcgatcacacatgacactttcaacaagttctgaagtgatccaaccaacgtatggcataaataagaagtatcagcgaattcatacctcgggcagggtgacattgggaacaatgacagtgttcatggcgctgggggcagcacggaggggctggttcttgtcgccgtgggggtggtactggtacttgtagaccttgccatcctcggactggccctgccagggcatggcactctcgccaatgcgaacgttgctctcagaggtcacggaggtgggcttgcggccgaagtacctatattatcgcaaataccgaactgattagcgaccgtggtgattattgtatgtgtatgcgccattgagagtgataggtaggtgaggtaaaccccaaaagaggtgccgacgtcacagtggcggaaatggggcgacccagggacgaggcattgtagggcaatttcgggagggatgctcaccatccggcaatcaggaaagcaccagacatgacaccgagaaggacctagaagtacagcagttaggacgaaagatcgagcatggttcaatggctccgtgggatccgtacgtagagctcgggatcacgcttgccggccttttcgaggttgccctcctcgaccttggcggagctgaagcggcgcgggggagcgcggaggagggactggcgggtcagagcccggcgggtagccagagcagcaattgaggacatggttgcagcaattcgagcgtgcgttggaaggataattcgtgggcagagaactggagacgggatagtgggagagaatcatgaacgtcgaatgatgttgccggaatatcaggtgacgctgagtcagcaccggttcaagcaatatgggtcacgactttcgagcttcctgttggttgatattctatggttcaagttatctgacttgctgacgcataaacgatcattcggtgttgattctgtgatgtaattggccttgacgatttgtttggcctctcgatcgctgtttatgcctgaggtatggtgttccggttctttccatcaggggctctgtcttggccccggctttgcggcgcgtttgttaatttgagcctaatgggattataggaccttgattaatccgtctattcacttcgctcattagttagacattgtctcggctccatcgtcactcctttctcagctccgcgcgctgctcaccgtatcccgtcgatattaactgcctacgttacaccgcaattcgcttccatcccttcgccgttgccaattaggaacacaatatgatagcgtgcatttacatctagcaatttttaatattcacatcctttcatggccatggaaaactccgcagatcgtccagagaccggcgacacaaaccaaggatcgataccgcaacatgtactagggattcctcgccctccctctgttggcggaatttcgtcccgagtgacagatgaagatggagagcgaacaccatcttacacatcacctacccagtcgcggttctctgctacctccaggcgtgctcctccagtgcggaactccatcaatgcacccagccaggtgaccagcaggcctggtagctcgggcagtcgtttgagtagaacacatataccgtccctgacggcacaggggttttttcggcccatgagctcgcaacgattgcaggcacaccgaggaacacgccctgcgactaaagggacgatttcatccaccgacgactggacagagcatggaagccagaacaggaggagcttaatctctaatactagcacagccccgcaagtctctcagcttccggctgatatggaagctcctccgtctcggggaacagagttcacagattctatcattccagaccgcaacacctccaacgctagccctgccggtaacacaaccatccgcagtctgggtgaaagcgtccgactgctgcgggatcgagatcaaaaggagaagccccagcgtctcaacctgggtgctaactatacagggaatgccgggcaggaggcaccgccaaaatcacccctttcattcctagcattgcaaaataggggcgccggacacaaccacgattctcgggctcatcaaggccacgaacatctttcctccgctggctcctctccgggttccattgacctgaaaaaaccccctctacaaaaaacgaatttgggcaagaattaccagtacttccttggcaacacattcttctgcggcggagggcggttccagaactcgagagacaagcctgtcaatattgcaacagggcttctaatcgttgtaccatcggcactgttctttggcttctcgtacgtgaattcgcttgatgtgaccactgggccactagctaacctctgaaatcagggctccctggctgtggcataatatctctcctgccattcccatagtgtttgcttacattttctacgtgtgtttctcgtcatttgttcatgcgtccgttgtcgaccctggagtaagtgactcgttcttgattgggtttggtgatcgctaacatgatatttccagattatgcctcggaatgtacatcctatgcctcaaccacattcttcggacgatcctctggcgcctggtccgccgacaaatgactgggtcatggtcaagcttgctacttccgatgtagctgccatggacgtgcctgtgaaatactgcaagacatgtaatatctggcggcctcctcgctgctatcactgccgtgtctgcaacaactgtgtggaaaccctcgaccatcactgcgtgtggcttaacaattgtgttggtcgccgaaattatcgctatttcttcactttcgtcagctcttcaaccctcttggctctctttttgatcggtgctagtctggcacatatattggtctacagatctcgggagagcatatcatttggggctgcaatctctaaatggagagtcccatgggccatggtgatttatgggttggttgcagtgccataccctacatcgctttgggcatatcatctcttcctagttggtcgcggcgaaactaccagagaatatctcaactcgcacaagtttgccaagactgaccgacaccgaccattcacccaaggaaacatcctcaggaattggattgctgttcttgggcgtcctcgccctcctacctacatgcaattcaagcagcggtatgaagacggtgaccaacgcttagactctcaaaagagcaaatatcgcgtcccggatgtcgagtcccaaggtattgagatggaacaagttggtccccaacaggattaaaacaaaaagtcgtttttttgcctgtcggccttgtttcgacggctacgatctgtgaagatgatatttatgatttcctcttttttgcttcccaataattcctgttcttactcataccagcgcatctatcactttctaatcactacattacacatacccttcttgtcgccatccctctttgttcaatttgctatacctagcgcagacataattctctcattctactgatctatgacgatctatttcttatcatgttatatgctgttacttgttgtgactacatacctgggaatcggtaaccctatccagaattagcctttactttccacgtcctattaggactatatattcaccgttgcttggacatttgatatcatccagtgtatgtcacggctagaataacagtccatatatccatatcatcccagacatagattctctcatgttcatgtgggggcgagagggagcgatttcggcattcggcacaagatctagcattgtaagccctggaagatgcttactcttcccttctcccttatcccttgctttcttattcttcttattgcggtaatattcttgtacgttgggacattctacgattggagtgttcgaaagggttgttgcacgcgtcagactctcgccctaaattgataagaagcgcggcgcgggaagctgatcctcttcgatccaccatcttcccctggtattaccccaaccactttgaccacacgcggcagttgttctacatcgatagagaaagggcggttccaggtggaattgtccttcttgttatcccatcctctccaaaatggcgccacgaacgtcccgatcaaccgcgtccgcagctcccgatgcccaggctcacgagcctactgaagacaacatgagtctcgacgtgccagaacaactattgacgcctgaaaacagccgctcggagacttcaagcaacaacgagaacgcgctgaccgacgaaacatccgcaggacggcgaaggtcaacacgggttactcgcgcatcgtcgcggccgagtgagccactggaggacacacctgagaacgaggaacccgcagcctcatctagcgaggcctatgtcgacagtcttgccaaggcgaaacgctcgcactcttctttacgccacagtattgcagtaatggaatcttccttgcggagcggaaccccagtcaacgatgatactgcggccgacagaactatggcccccgacacgcctgtctcgaggtcttcccagggcttgcaatccgaggatatgaatatggcgcttcagcagcggacgctacgaaaccgtgtggggaaggaattggtcgaagacgaaggaacgaccacggccgaactagtcccatcccgaacctctccgcgcaaatctctacgacggtcaggtcgcttcgatttattgaataaggcttcagatttggtcatccgggccagcagcatactgggaaagcgcacgagaagccagacagacaaggatctcgatcggcgtagcagtctccgctctcgcaatattgtcccgtcgaaagatgaaacggctctttcgacagccaacgggccagcatcgaagaagcgtcgggtatctgagagcgacttgtccaaactccgggatcaggatagttctgaagaggaaccggctgtgcctgcttcgtcgcgacctaggcgcaagatatggctatcacatggcctctatacaggacaggaaccctcagactcgcctcctaagcagcgtcggagtaagaattcgaagaaaactggaacgggtcccatgcatcgcaccatccttcctatgcctatgttcaaaggtgctcggcttttgaagactggacgggactacctgctgccgtttgatatcttttcaccactaccacctggccagcctaagcctgatgagtggcgcaagactaacaagagtgagtgacgagtatcctacatcatgaagtgagggctgacagacagtctagatgtttttgttggtgatgccggaagcttctggaaagccaacaaaaaactcgagctgtctacttgtatgtgtaccgaagacactggctgtgatgataactgccagaaccgctatatgttctacgagtgtgacaacggtaactgcaggctgggtcccgagtgcggtaaccgaaatttcgagggccttaagcaccggaccaaggccgggggcaagtataacattggagtcgaagttatcaagacagcagatcgcgggtatggcgttcgcagcaatcgttccttcgagcccaaccagattatcgtggagtacaccggcgagattcttacccagcttgagtgcgagaggaggatgagaacagtatacaaaaacaatgaggtacgtgccctttctgttgggctttactacttactgacatcgtgaactagtgttactatctcatgtattttgatcagaatatgatcattgatgctactcgcggttctattgctcgctttgttaaccatgcctgtgagccaaactgccgtatggagaagtggactgtcggtggcaagccacgcatggcactattcgctggggatcgaggagtctcgacaggggaggaattgagctatgactacaactttgagtgcgtattacatgcatatcaagctacttgaccatgcgctaacgatgtaccagtccttactctagcaagaatgttcaacaatgccgctgtggatcagcgaactgtcgaggcttccttggtccccgactaaaggataagcagcaacgtgccaaagaactcgagaaacgaaaggccgagggaattcagcaggcaactacaaaaaaggtcatcgataagaagcgcaaggcctcagaagaagtcgaaagcgatgactcccatcaaggtaaaaagcgcaagatgaccaagtccaaggccatcaaggccggcgtgaaaaaggccatggctaccgttcgtgggaagaaaacaaccaagacaacggcaaaatccaaaagcacaaccactgtcaagtcgaagaccaacgtcaagctaccaaccgtgaaagctacaggccggatgaaggccactgttcgctcttcccggtctaacaaagcagccaaggaacccccggcttctcccaagagaacatcccaactcaagaggccttctgctgagactaagaaacaaatcctcgctgctgcttccaaaggctctggggcttctccccgcaaatctgcgaagaaggcccctacccagagccccgtcaaagctaagaagcctgctcctaaggctaagagcactagcaaagggagatttggcaagggagtcaaatctgcggctcgccgtgttatgaagtcagtgaagggagcaaggaaatgattgatctctggtcagactacggtcgttattgctgttacggacttgcttgaaagaaccgaattatttgcgcaacacatttttgctgtctggaatcctaggtctgtattctttgttgaccttaatacttgccagtgatccattcgttctattctatttgataattttctggtaatttattctttctatggctaaaattcgggttggcaatggtccccttgctcgacatcgtgtcttccctttgcttcctttcgatttccctgtgcgttttatttactatggcttcatgattccttcggtcttcatttatgcgtcacggttatgaaagtgagagattctgatatagccagggtaagatgcctctgaattcaacatggtttcccctggaactctagtactccatagctcattggatgcatttgtccatgtttctttccccaagagctgtcaactgcaagactattcaaaatcctacaactatcgagattcagatcaccctacgatatgaccctactcatctatcctagccaataaatcgtatagtgtaaaaggttagatcatcagaccaaatctattggcaaattgaaactatctaaaccaggggaatccatagaaaaagaaaagaaaaagcccacgagttaaaagccagcactttgttctatgtgcggcaaaacattaatcgactccaacaagcctcgcgcaagctgagaaattttaaatacgctccaggaagccctggctctccaagatcagaatgatctcgtgcacgatgctgcgcacactctgcttggagaagtcgacaacgagatcagccttgtcgggagtctcataagggtcatcaacaccagtgaagcccttgatttcaccacgacgggcagcatcgtagatgccgcgcttgtcggacttctcgcagtactcgaggggagtggcgacgtgcaccaagaagaaggagccagcctgggagacggcgtcgcgcgcgaacttgcgggactcctcgtaaggagcaatgggggaggcgatgacagcggcaccggcacgggtcagctcggtggccacgaaggcaatgcgctggatgttggtgtggcggtcctcgcgggtgaagcccagctcggaggagagctcgtggcggacggtgtcacccagcaacagggagacggaacgaccaccctgctggttcagggtaacctgcaaagcacgggcgatagcgtccttgccggagttcatgtagccagtcaggaagatggtgaaaccctgggtggcgcgaggtgggttggactcgcgcagaattttgacaacctcggggtaagagaaccactcgggaatatgggcaccggagcgcagacgacggcggagctcggtaccggagatgttgagggtcttgacgccagcggggacctggtcaacggggcggtactcgtcggtatcggggaggtaggtgaccatctggaattcgacaacctcgatgccgagctcatccttgtacttctcgacggcgtgttgagcatcgtagggaccgtagaaatcctcgcccttggagttggaaccaggaccggcgtggtcacgaccaacaatgaagtgggtagcaccatggttcttgcggatgatggcgtgccagatggcctcacggggaccacccatacgcatggccagaccgaggagacccaggacggccatgccgttggggtaacggggaaggagcgcctcgtatgcgcggacacgggtgaagtggtcaatgtcaccgggcttggtcagaccgacaacagggtgaatcaggacattggcctggcgggaacgagccgcgcggacagtcagctcacggtgagcacggtgcatggggttacgggtctggaaagcgacgacgcgggaccagcccagtttgtcgaagtggacgcgcaactctgcgggggtgtctgtggaaggattcattagccagattcaagatcaggatgaagaattgaacatacagcggagggcgacatagtcgtagtggttcagcttgttgacagcctcgatctttccaccaatgtagaactcctcgacggagttgttcaaatacacgatagccgggtgctctgggtcaccgccgaagacaagcttagcctctctagtcctaaattggagaaccgcgtcagcgagccccactatagcacgaaccacatcgactcattgggtaaagattgaagttttgtgacatcaaatggtcatgataaagataaaacagggtatccgaggagaaataacgatcgacagtgcgaccggtttcggcaaattgtgaaagagaaagggaaaactcacttgtcggggcggtaaatgtcatcaatggtgagaatagccaagttacggtcgtcacggaagtcacgcagagtgatgcgagtaccggcttggagcttgttctcttcgataacctttttgctagcgtcaagggtaatgggcatagagaaaacattgccatcggcaaggcggttgtcctcacagacactatgcacattgtcagctgctgctgttgtatattgtcgtgcagaatgaggggtttctcattccaatgggatcatctgtatcaaacataccggtcgtagtctgcctggttcatgaaacctgcacgaaaattagtgattgtcctctatgcgcatgttcaaagagaaaggtcatttgaatctgagaatgaacaatcgcacttaccctccagaggagagaaacctccgttcatgatcagctcgagatcgcacagctggcgctcggtcagcgtcacagcggggagagtctcggcctcggcggcgagctcggcgtgacggggagcatcgcgagcgagaaggtccttgaggacaccaccgtggggggcgttggccataatgaataataaagaacgaaagatggaatatgaagagaagtaatgtacaagaaaagaaaagagggaaagggtttggttatcaagaaatttcgagtatggaggggtgtggattgcaccatccacatccaacagaagtcgtcaacaagtggagaccggtggaagtcttggcttcggggtacaggaagttgtttgtgctgttgttatggattttatatggatcttagggctattagggctattattatcttgtgtcgaatgccttattcagataattagcactatacaacatatatgtctttctattttagtagtataagggtataattctgatattctgatcatccgaagaccgatctacaacgttgtataactattgtacgtactgcagtttcagattgtcagattttcaggggcaatagacacccctagaacccctgactgatatcatagaggctttgcttctaaagaaagatcttgtaccccgtagtacgtaggagtacacgtacacttagtatacaaccgatatacctaacgctatccggaagtccaaaagcggcttagctcgacgccacatctgcagaggctgaggtcatgtgaccaagcacgtcacctccgcgcggaatcacgacatcccatcccccaattaggaatagatcgcccgggtgatctgaaaaccctaaatccggctagaattccattaatatacaacgccaataacccgatatattaaaactatggacactatatacatctttccctacatattttcactccgccttcaccgtgctattgggaagtgtgatggtcaatttctcgaaatccacagcaaacgcccctaccttcatggccggctgagtcgcgttcgcataggaatcggccaggtattcttcgatgtcctcctccgaggacagagcggtgtcaagcgagcctgtcttctgcagaatatacaacaccgcaattcgagaaaacccaacaaccttatcgggaacgctgatcgcagtggatgtggaggcagcagcagcagtggtttgagagctggccttggtagcggaggcgctcgtcgcagactcggtttgagtgggtgccgacgtggttgtagctgtcttgcttgattccgagtcgtcgtataggataccgttcatggtggcttcggaacggacagccaggactggtgttgggtcggttttcgacacggatggcatcgaatcggctaccaaattcacagatcgtcgggtcttgcttgtgtcggttgtgacagcgctgaaagctacgagcgcgttttcggtcgtgcaggtgacgtcgttcatgttgaacagagccatgattgtgactgggtcgagggtgatgttgaatttctccttggattcgttgaacagaacaggaagtgcactgcccatggtcgcgttcgatccgtcacttatcagggcggtggtgcagctaccgtcacccaaaacggtgcactgtgagccgatataaccgttcgaacaaatgcacgagcattgggtgccggctgagacgcttacacctccgttttcacaagggttcttttcagcacagggcgtgctcgcattctcgcggggcacggcgacaaggaacacggggagaagaactgccagaatgacaatgatgaagattacgacacagatgagcacgaagatcttccgaggtattccacagcatgtcttcttgcgtcggggagcattagggtcgtcgtcgctcgagttaagctgctcgacattacgcaagttagagcgtccaaagaacacgggccatgatgcggttgatccgcgcgcttcgggtgtcgccaaacccggcgggggaaaggaggcaagcatttccgataaagagccagaattacgtggtcggtgtcctaagcataacagcagttagtactattttcggtttccacatagcctggatccgaaagactcacccatccctttgaatccagcctcatcaccagccagattggctcggctggcggttctcccatgatccaggttcgatgcgagctttgtcgccctccgaatcaaatcagataaactggaaagactcccacgagcctctgcatcccgcaacgcatgcatattcagagcaggaggcttgcgaccgccaggcctcttgtcactcattgttggtgcagcgttgggcagctgtccgaaggcctcgagctctttttcgagttgtgcattggaggagagcgattcatgctttgtggacaagggaggtttttctaagttcaggcctttcggtggttcactcgatgtagtagacgactttcgtaattggcttggtatatggggcgcctggcttgcagcagctcccagcccgacagaccgcgccgtggtgcccttggcggattcctcctgggtaggtgctggcatgtctacaacggaaacagggttagacttgaggatagtacgcatcgtcggctttcctcgctttccaatactggcatttcggacaagcctcgtatcgtcctcttggaagccaggtgagcgctggccatcgtctgaatctatgtcgtatgctcccagaatctcggattcagcgggaccggatccccagcttgggatggctcggctcgatgcgacggagcattttgtaaaccgaggatgggcgagttcttctggaatgggcgaaacagatgatcgacgagcccgagggggccgtcgcgaattcagcggtgcgacaagacctgccgtccggtgtctaggctcatcctgagaaagatcggactcggctggcagagaagtgggtggaaattggggcatatcggaggctacagattgcctgaacaaatcttccgttgcgatcgatattcgaggagtcaggtcgattgtgctggtgggactggcaggggtattatctatcggccggtgagactgcgctagcgcagaaggctgaggttgcgaggaggaccggggaggtaatcccatttctgaaactcggctatctcgttctgagtaaatggatggcgaaggcatttcacccggatgaggtggtctctgaggtggaggaccacgcggaaccaaatacctaggatgttgattggccgggtgtggtgggagacctgtatcaggaagaggccattgtgcctggtgggagatattcctagggacgggaggttgtctcatctggggtggcgaggctctttctggacgcacgccggcatctagcatttgcctggcccgtttgacggatcctttcctggcaggctcgccagagggcccggagtttggtaagtcagtgctcattgagaagtatggctaacctctcacgagaagttagggctcgcagtgtaggaagtgtggcgtggtactgctgtccaaaagagagacttgtctcttaaatattgaatgataatgaatgattgctcgatgccttgatcgagctgaaaaaaaaaaaaaaaaaaaacgaatgaaaagatatcaaaaggattgaaaccagagaaccggggtctggccactgagcaagtgtctacaagattgtagagagtggataaagcaatgagaacgatctagcaaggcgagatccacaggatcaagatcgcaaacgaatggaagggcattcaatgccactgtataaaatcgtcagggccagcttcaagtcatcgtgaattggattcggaagacttaccgttgaaaaaggggactgggaaaacgagaggaaccgctagtatcaaactggcgttcaaggatagattagccccagtctttgacctggatagactaccaattcaaatggggagagcctcaagctcttctaagggtgggaaaaaggagagaaaagaggcattgaaactgacacgaccagggctatggaagctagtccacatctcaaacgggaagtatattaaggctaaacctcacggattaatctattcttccttgatttcgtgcacttccctgtcgtataagagtacgaagttgcatatatccaaagactacgtagtccatgcatcctgcatacttccaacccccttctgatctgcatagcacacatgtcgcttttcagcattgtacttttgtagcgaaaagtagggaaaattggaatgaaaggtcaaccccctcaacatgagacggccaaattactccgtagacgaatcacatctcgactgtatcagtggggttggtattagtcccggacgctaacgtctcatataaaggctcccttaagtaatttgaaacttgttcaatgagttattgaatatgttatagcacatttatatccatgcattgcatattgtatactccataggcttatagactccatagcacatgggactaaaagacgttgaatgcaaaattaaaggtgcagggcggctataaactccgtactttgatagactaggctttgcactgaaacacctttagccctacttggtattagccatttacagccccttaaatgaataatttattgtacgatagatatttctccgctcgagtctatgcatccacagtggcctggtctgggcccttccacatgaacagttcatcatgaggatatattgtacatggtttcctgagttcaacttttagatatgaggcatttgcgactcccaattttaattacatctggtcatacaaggtgatctccttggaaccgcaacaatataatgctttgtgcgacctgtcaaccaacttgaccttgcgacgacggatcaaccgtgcaatatcggacaaagtcacggatacctacaacatagtcgcatcgggggattcgatttccagccgagcccgtaattcgcttatctgctgttccagcgctcgcatttcgaccgttgtactagccaaattcggcacctgattgtctatcgcatttgcgaaagagtcctgcgccctgcgcagcgactgggggaccaatattccataccaatgaattggatcagtagaacgaaacttcttaggagcgggctctggtttctcgacaggggtgatttcggtttctgcagtgtcagagggttccgagctagccgtctcagccgggctggttttctcatgtccactctggaccggagaagaagctttggtctcgttatccccatcagcctcctctagtggatcactggttgtacttttgatggagaatgtgtatccaggttcaggtggcacagtgatatcccctttctcttgtggatcgttcgtgggtttctccgtgtcttgttcggattggattgatctgtcaatttggcccagttaacaagcgccaggaatcaatgacagcaggtgaagttacatctttctcgttgctttcatgcgcccatcgtaataatcaggaccataacggcggccaggaggactagagaagttggcctgggcgagagcaaagaacccctactttgtctcagcatatttcatgaaccatgattgacagcgtcataccgacgacagatggcctgccagacttgactgtagtttctgctgccgatcaagcagatgcaagtatttctcaaggagtgtatccaaacattggactgaatcctccaaagctacaggtttcaccttcacttcgggtgcctccgagcccggtcgcgacgctggtggcgtgggtatttgagccatggagaaaagactaaaggccaatgaagcagatatgcaatgcaaatatccacaaaaccgagtgacttgacaataagtccgataaatcccaaaagcttgagatacagaagaaacgtggagcaaaggagctcggccccggtaactccgtcattcgtctccgaacccaaaagaatttcccatttctgcgcttcttcttctctcttgcatacttcaacccactgtatctcttgtgttgtaagagactgtgctactattgatcaaacccatcgattcctgtgcgatttaatttcccccgaatctttgttcttgcaagatcgaaccgccaccctccgattgcgtttttgatacgagtcattgcgcccaacgtacgtgaactacactctggtatctcgaccattgcaatacgaacggtcgctctaacccagcagctcttaggaccacttcttgccgccgcagcgccgtgtcgaccacgcgaccaaggcatcggtgataacctgggttgaccaagcaggcgtcttgcactactcacattcggctttttgactctgattaccacttggatcctcttcaaaatattatcataacttcagctaccatgtctgtcgcgtccctgcaccgtgagactgccttccaggcacggtctttggtatgtcctcttgactttatatgcgcttcaacctcttgtgtttgtccttgatgcatcaaactaacgagcgtctttctcttttcattagttccgctcccttctgcgctattccggacagttttccaactacaacttccgtgaattcgctcgtcggaagacaagggattcgttccgcgagcaccaaaacgccacagaggaacgccagatacaggaactgatccaggagggacttaagagcttgcgcatgctgaaggtcagtggtgttacatggctttctcggggtgaaactcggtcggtggcagatatcggggatccatcctcagccccgcatattgaaagtcgacgagtcctcatcctaccacactgccctacaaatcatcggatccaaatcttgggaataatatactgacatagccacagagacaaacgatcatcagccagttctaccagttggataagttggtggtggaaggccagaagacagtaagttctaccttggcttaaggccttcctccagcactcaaacttacattctctttgaagggaaaggaaaccgggaaccatggaggtattgtccgccagaaggatactgggtaagtcattcaaatgaagctccaacccaccttctgcatgtcactgacttgtagtagttgggattgattcttagacgttggatgggaacttgttattattccattgtgttttttcgataacttgccactggtggactaattaaacacctgctcttttttgtatttatacacccagcgatgcagctgcagctgtagctattcttttatcaagcaccagaaacacccattccactcctgaatcacaaaataaatcgcttttacttgaacaatttgctttatatcaattgagggacactgtcacaatatagatagctgccatagcaagatattgcatcaatgttcaataagtatgcatcacgtgatatctctttacggttctgtagcatcgcaacgcgacttgaggtgcactgcactgtaccaccacacactccatcacatcgcgctaaagaatcctgcccaggaggtcgccataaggacattacaagctttctgatcgggtgcacttgcctttgaatttgtataggggcatctgccatgccttccacggtacgtttcaacttgcccccgtggtgatctagcgccgacctggttgccctagacacatggtcattccagatactagatcttaaaattctcgaattagctagctaaaatccaccacagttcagagcctcgcgctcagggcgacacctcgatggtgccccaaaccgcacccgaaccggccaaatcgatcacgatgtctttgagggattgccagtgcgtcgctggtcccgacaacagcacactttctctcaagcgcctaaacctgttgagtcggaattcgccgttcaaggtccaggcggcgggccaacgctaccagagctccccatgccaagagacagccagctcctaccgccaatcagtcgcgcactccttcgagcagcccgtgctggatgtatccatatcctccaaggtagtcgaacagaggatgaggataaaagcggagaagatgcggatgattcggcctccgcatctcatgtggctgatcggagcttcacaactcgcaaatggatgacgcttcccaagcacctcgagcctgcggaggtggagtttctggcaaagaggcgacctggtctttcatctctttatggcaccgttactactatagatggaagctccgggcccatgaggagaacaaaattcaagaaagttgatccccaaacaggcaacatctctatctacgaggcgtgggtgcctgagggccatcgcattgaaggagagattactggcgacttacagacatttgccgagcagagcaatgtgcctgtgaagcccgaggcgcctgcacctggaacaatcgtcgagggggtcggcattgtcaatgctgagggtgttgttgttgcggaggctggatcagcagctgtaatgactcctccaaaacgacgtccacctccacctaagcgaaagggcaagggtattggaaggggccggaagaagaaggtcatgtttgcgcctggcgaagggtctgatgccgcgacagtacatggagctggcccctctcatggcaatggggagggtgactacaagagagaaggtcagcaggatgcttcacgtatgtccattgaccaggctggtcaagatgaagacgatgaagatggtgacgagggagatgacagcgatgacggtgatgattcgatgatggatgcgaagacccctgatacaccccagcctctgtctggcgctgagtttgtgaatcagccttcattcgagactcctgccaagcaatcggttgatgtcgacatgtctgatgttgttcccgaaaaccggccccatgcccctgaaattccttcattaagcgaaaaggacgagcaaaaccagcccgaaaacacctcggaggtggatttcggtgccctgacttccaatgttccctcagagaaggcggaggtcaacgcttccgatgagaagcctgtcatttcggagcatgacaagactcccacttctcccaccacaactgccgcaacgacaagtgaatctaccgagctcccagctgcagttgccgaagctcaaagttcagatatcaaggtggaaggaggagaagaagccacagagccgacggctgaccttgcaccaaaggaggaacctcctctttcaaaccaacaggaaattgcgactaccgtgccacctgttgaccccgaaattccctcggaacccccagtagcacgaccttcgacccaattgcagacacttgagcatacagaaaccgagcagacggcagtatcgaacaatgccttggatgaggctcaggaacctcaacagatcccagacgagtccgtttccaataccgacacacaagaaacgctctcgatagctcctgatcgtgaacaaccgaacacctgcgatgctttcgggcccagtctacacccagacgaaacaaaagacgtcgcgatgggagatgccccgtcaccagaacaaagccaagggctcaatgcccagtctctcgcgaacccagaagtacctgaagcgccagagaccgaagagcatccacagtccaagcccactgcagcagagcccactgcagccattaccgcagacttcagtctattgaagagatcaacgcctgccgtagacgaagagtcagaaacagcaaccgaaacaagtgttcgtgatgaaactcttgccaccaaagcagggctgcaggaagattctcgatctggcgaagctaaggaagcccatgacgaacttgagaaactacctacgatcccacaggctggttcgtctgagtctacatgagccacttgtgagggctttattttctcccagccaactaatgtacaatgaatggcattggttttgtttattgcctgttgatgggattgtttatgtttgtggataggcgtataggatcattgtgcatcatattgtaggaccacatagtttattcttcaattcaaatcttttcttcgaagtgactccgtttactcgtgcttttttctctgttcttttgtacaatagacgcttatcttagggatgctgggtatgaatatataaattacagcatacatatagagatgagaagaaagtagcaagtattatttctccatatggcgaaattagcgaaggagaattagttacttcaaagcaaagccaaccctacaaaagtttcttcggaaaagaaaaactaccaggcaagttgctgaatatccttcgagatctgccatccatgcgccaatgcaactcttctgtaggcgtctactgcttcgcctactgaatagtcgatttttgcgctatggatatccagacgcgcgggtcttgggtcggtgctggtaatagccatgcgaacctgcaacaacaaactctcaattgaagtcgttggtagccagcccgagtgtgtcagcagttccatgcacatagatccaccggcggtaacgtggccgccgccccccgcggcggactggaggnnnnnnnnnnnnnnnnnnnnnnnnnnnnnnnnnnnnnnnnnnnnnnnnnnnnnnnnnnnnnnnnnnnnnnnnnnnnnnnnnnnnnnnnccggccgcctccagcggcgaactggaggaaacgagggcgaatgacccgtacaaggggtggatccatagggaattgccggggaaagcggagctccaagacgatgcttttttgtttggtctttttgaggtcttttgctagtgggagggatggatcaaacgtatgcagctctgcaatccattggtagactgttgtaatcaagctggggtcgacgtaccatccgagctcatggagtggcactcgctcctgggtttttatggtagcctgaagatgctgctgtaggatttttgtggctgaggtagtcgcaaattggggtggagagagtgtaggcaaagaagtatcctctagggttccgggtcggaaatcagtcttgaggtctgttgctgggacagctccttcttgcatgctaggacctgggggactttcacacatctcatcgtcagataaaagaatgctgagatcctctgtggtcgtttcaacgctgacattgtcgtcgttgtcgtcgttgtgttgttcagtatcttgaattgaatatttgcgtctcttgggtgacggcacaaggtctgcaagcccggtttcactagcggcatgaaggaagtttgccctttggccgctaaatacggagatgggaattttgatctgtttgttgctgggaccgacagccggataacgtttatcttgtttgtataaaaggctttcatcatgttgatacgatgatggctgggcttttgagctctttgacttactcccatgcgcatatccatcagttttctttgccataccaggtacgttcaagtcacagagcttgacgaaaaggtaccttggttggatccaatccaagtgttgcacgacgtagggactacggcacacaaactgattgggagcattgacgacctcattaagagaaatcaccgtcgcgagctccagccgactcgcggacaacgcgggagatgtggaaaacgtgggaagaagattcctaccacagtatgacaatgaggtatggaagtggttcgacatgtaaacaccatgaccacaggagcggccatggacaacttgcttgaaatgcaacccctcacgtagaatactgtgccaattatgcaaagcgctgccatgccaagcgaatatagtaggatgctttggattctgggccaaagaagtggagttgaccgcttgaagaaagcgctgctctttgtcgacagcaccttgaacaagtctgaattgcatgtagtcgcccattccatctatctgatgccgaggctcatcgacatcttgcttgatgaaagatcgatttgaggcgacaacccagcgtaaaaggtccaatccagcaggggatatgacgtctctccaggttgaaagaagcttgccccttttgtcactctcaatgaatgtcttcatttcctcgatactaggtagtatggccaataggcaagaaatcatccactgtttctgtgtgggtgccaaatcgtctagattggtgtcataaacaacaaatctcacttgctggggctccacccctagcacctctcctggctgcactcgacggcctctactaattggacatgagatgcgaatatgatttaacgtctcgccaatgtgttcaacacgacagtgccattctgcaggttttggagtcttcataatgaggacaatccaatcgccgactttgaccggagtcggctgatctagccgaatttcaagatcggttgcatcaaattgcccgatataatttgtagaacaatctgagttttctttaggaagtaatttctcgggtacgcgtagccgaagaccagttgggaagtcttcaagaagccccgctgaagccctcgcgtatgccaggctggttagcaagtcaacgacaaagggctgggactggatctcatactcaaggcttgcacccagtcccagcgccatgtattggtagaggcataaatcattggagcaaacatatggcttcagtgattcgaaggcatcaccagttttgcagtggcaaactaagcaaaattctgtgcacttgacaaaatgccgcagggtaaactgcatggcaagaagaggaaaagacatattagagatattgcggtccagttcggtcatatgatcagccaaaaggatttctggcgtcgacgtggcccagctgtccggctgatagtcctcctcggaaaagttctcagagctgtaatccctgccttggttggtctggaagaaaagttctgcccctgtccatgaaagcccatgttttagtcgaagactgatgatcccaagcaggcgctctctgataagtaaattgagcgattttccaatgaacagcggcctgaaaagatgaccacgtattgttttgtccgaagtcatactctcgtctttcgtccgttgatcctgtgactcctgtataacttccatagcgtgctctaaggatggcttgtatgagctgcaaaggccaacattcatctgaaccggtgggtttttcgaatcaattgctatctcgataattgtttggagttcatggtaagtcggtcgataacggatcagcaaaaccaaatactccgacggttcgacgccccaagaatccatagcttcctcggaaatgccaagcttggaaatgcggcaagacactgacacaataatatcgccatgttttaaccccaggtatcccactttgaatcccgcgttcttgaccacacgaaggtcacggcgaatcttctctcgtaacttcgtcttactttgagtagatgtgaatattctggtttcatcatcagactcccagcctggctcagtatcaccggcagtcgagtcgtcggagtcggagtcacgagagcctaggtcctctaggtaactggatgtcgaatcaggatcaaccatagagttggtgatcattttctcaatgttgcgcaacaattcatggatagttaagcctgtgaatgaaggcactgcattttcgagggaggagctgactgtctttggacagttctcggacgatgggaagaccaaaaagccatggtccctgggataatcgtgagagtctgcttgtacgtcagcaagagattagatccttgaaagatactatgagctagtaatattaattaccggaaactatagcttggagatcaagggtgaggcttgcctcgggtgctgcaaatgtgaaggaaattgatccatcatactcccctgttctgatatcggaggtacaggggaatcgtccagggaccgctgcatctgcgagatctcgcaggaattctttgcgtggcatagtacggtttgactgcgttgaaattttgaaaagaaggtggaaaagaagaagtaatgagacgcgaaagtcagtgtcaagagtcggtcaagggatcaagcctagaagtgcttcatgtatatcaaagaagtatatcgagcaaaataaagacacgatgagaaaagaatgacgagcacagaagaaaaacaaagagtaacggcgtaaaccatttggtgatttcaaccatgaccaggtacttaggcagcctcaggccccgattaggaatagccccactatcttaattcttatctaatcgggtcgatcggtcttggcaggtccactccggggcttctatacttcatgcattacggagtagacaaactcatacatgcaaacctacagacctaagctagatccaagtctacaggaaaataagagaggcacgaaggagaaaatcagaggttcgcttttgaggaggtctttgcgagtatcctccagagaaagcgccattttgaattctagttcgtgagatagtctaggtgctcccctcatactcacggtaagatgtatagaaagggctcgcttagggagtgtttcttgcctctgatgctagaacaattcagtccatgaatatgtgtcaacgaatcagcaggcgaagcatgacttctgtcacaagaatacagtgcaacagtgggcttgacattgaagacaatgcaaattctagcattcgaaactgatttatatctgtcaaggaactgttaaacttcgattctattattattatgcctatttcaattcgacctttccaagcattgcgtccgagttgcactacaacatctacaacggtcacgtgcatatcaaacaagacaaacattcatcaccaatacaagtaaggcttcatcaatctccaatcttttcagtaacacaatcatgttgccccctcgaagcgccatcggtcgaataccgagtcatatccggccaactcatctgcctcggatctccggtcccaacgtacatctccgaccattcacccaccgcacacgcctacttcttctttctccagcgccgggtcgccctcaactacccttcctatcacctcttgcgccgacccgtccactcccaccgctatcaatccacctccgccagcatttcggtcgcttgatatctaccgagagccgcgagcattacaagcgaagggtatcgcggggtgtcaagatcggcctgtcagtgtcggccatccttgtcttgttctctgcgatacagctcggcatctaccaagaaaacattgagcattcatggcccactccaacggagtggtcctggaaaagccgctggtgtctgcgatctgcgcaggcactgcagaatcctgagcagatcggcaagctgatgacgaattggcctatggtcgctgggtatcttcgcgagctgctcgagcgtctggagaacctagagggtgagggcaaaggcctcatagaacagggtgagggtggattcctggtcgaaggcgtcggccacactgggttcgatgtctccgcaaagagtgagccttggcgccgtggatatttccaggccctgatgggtgctgccaaggctgctgagaacctagatggctggttgacagatcgcaagcagaagatatctgcgcctgcggaatatgttgttggaccctcgaatcctcgaccaaaacccatgcccgctggccagaagaaggtcccacgggaagaggattgtgaggaagcgtctccgtctccggagcgcttctacatgaagatcttgacaacaaagggctttgacacaaggcagaaacttgatgctgccttggcttatgctgattggcttgatttcaaaggcttgggccttacggcgggtgacatgtataagtgggccttggacattgctgctggtgggttgaaaggagatgctagcaaaattgtggatttgaagagcggcctgttgaagaataatagtggagagctaccttcagagaatattctccgtgtctccacggccctcgccgtccacaacgctcgtcaagccaatcttcccacagcgttatcccttttcacctctgttctcaaagcccgacgcagcctccctttatcatcggactatgatagatctccgtcctttccaactctgcctaaatccaacaacgacccattctcttctctcttcaaatcgcttaaaaatgtcctcattcccgtgaagtacccagaccctctcccatcaggcgacgaacccccacgtcgcaccacggcatcagcctgcgaagaagcaggattaatgacctacatcggcgagatcctgtacgcctcctcgtcgaaggattccggtcttgcctggacgcgcgatgcagtcgacatggccgagtccacgatgctccaactcagcaattcagccgaccgcactgctcgaactcgctgcgcacagtgtctgaaagttgggctggagaattggaaaatcatggtctctacccttgttacccgtgctcgacaagaagagcagaagagcagggatcaggctaagggtgcttggtttggcggcgaacgccgcgtagaagcgaagcagctcgatcgtcgacgttgggaggctgaagatgctattctagaggatcggattcgtcgtctcttccctctcctcgagggcgagtccgggctggatctcctcgctccaaatagctctttgtttgtgtagtgttattatctacttgtatacctggacatttttggtggagttgaggtgacttttgaatatgtacaacatacagattatgttcgccatggcggtcaattttgttatccaatcagatttcccgtatatcaaaacccgtcgagctttgtagacctctgtactccgtacagtccagcgaagtaagcaaatcgacgaggattggcaatatcctatgttacaagtgtctatcattgagggttgactaaatcgaataatgtagtgtatgtcacaaagaaacaatatatttttctaagcgcgaagacgttcttgctaccttcaagagttcgcaccacagtttctttgtggcctgagttctatctcattgtgttatttgcgtcaacctcatcgttgaagttatatatatataacccgggacttctaatgagtcaagaaaccaacaatccgagcttcatgcgctttgagggagtgttcttgtatgaaaatgaagcaaatggtaagaaatatttcttatatttgaaacatatcattgtagacctattgagagacgtgtcttggtcaaatagtctagtcacagtctctacatagcggtattggggattacgatcagccgatgcaaattggaagcataggctttgagacaaatagatatatgatccaaaaagagacaaaagaaatagcagcaagaatgaatgttgactagtacatagtaagcttcgcctcgctctgtcaactggaccttgagctccccaagcatttgactgtgtttccacatgggaacgacagtgtggtatatgtacatggaagagccaaccctgacacacactcaatgatttcctggcggattcgaaggggagtctcgagtatatggaaagattgcgagcggcctaatttaggtggccttgtccttgttgtggtagttcacatcggagttccagctgtagatgagttagtcctggggtttcagggggtgatgtggaatgtcatgcgatccggttgagaaagcagatcatcagatgtaagattgcagaagctgctgttccgcagaacaatgtatagtatgtggtggggtggaaagtcggaactcacaagatggtctattccggacatagattagctcgagtcttcagcacacagcataattggatccacataccttatcaccgtctccccaagggaagttcttcgtgcggatgttctggtaagggtactcggtgcgctcctcgagcgggggcatgtgcgaccagtgctcccagtgctcattccagaggttgtaggcgttgagaccaccaccaatcaggcagggaatcacggcactatgaagtaattaagttttaggtaagagtgtcaaaccaaggagtggattgaaacgtacaagacggacagcttgagccagaggcctgtggaataatcgggtcagtaatggatattatctacggccaatgaccatgctgcacaatcaattgagttaattgtagggtacatactgctggtagaggcagcatggtgcttgacggcagctctctcgcggttgaattcgttgtcgacgatccaagaaggcttcgcttcggcgctgttgaaacggcgctggatggtggagcggaccggagcggaacgcatctgctgcgaagcacgctgggaaaggcgaccgatattgcgttgagggaacatggtgggtgatgctaaggagatctcttagtggtgaaggtcaaaagtggtgcgatgaggtctgaagccgtctttagcgtatccccgtgatctcccggattatgtaacctgatgtcatgaggccttatatatcaggcagacacaaggctactagaatcacgtgatggttttgaatatgtatgaacgtcgggatgcaggtcccgcaaccaattaactagattgaataagtaagggtggctctaatccttggctgactcgatcttttatattgtatttcgacctgtcttgatcatttgcatcgcaagaaatgccgcgttgtccccggatacactagcgcgtccaacatgggagttcgcataaccacgtggaatggtaagtcctatctgaatcatcgggagctctgagtagtgaatatataccaacggcgcataaccttttagtcaatggtatacggtatgaaagaaacctgctagttgaaccggttcaacactaatataacaaaagaaacccgttctcctatgagccatggagaggaacgcgcacatttgaggtaagtgtatatccttctatttcacagtagccgagcttatctagtctaaagtctatgtttgatatactggaggcggatattgtaattctccaagaaaccaagattcagcgcaaagacctccgcgatgacatggtcttggttccaggatgggattgttatttcagtctccctcgagtcaaaaaaggcaagctaatgctccattgctatatatacagaagattaacagcttttaggatactcgggtgttgtgatctacacgcgcaatgccacttgttctccaataagggcagaagagggcattactggggttctctgcccaccaaaatcctcaacatctttctgcagtcttccagaagagcagcagattggtggatatccaacgttagatcagctttccaggcccgcaatgaatctcgaggggcctgactcggaagaggagcaagagtatgttagctcggtgcccaataccacaatagatgcaccaaacctcgactccgaagggcgttgcgtcattctggagtttcctgcatttgtccttattggtgtctattgccctgcctatcgggatgagaatcgagatacctttcgcatggactttctcaatgtcctagattctcgaatccgaaacctgattgctatggggaagaatgtggtcgtggctggggacatcaatatttcgaagcagggcattgatgctgctcatggaattgaggccatacgaaaaggtacaatgaccgaggaagaatttatatctgcgccttctcgacgcctgtttaaccacttgatatcggatggcgttgttattggtgaacgtgacaaaggcagagaagatcctgttctcttcgatgtctgcaggtcattccatccaggtcgtgcaggcatgtatacatgctgggaccagaaactcaatgctcgaccagggaattacggctcaaggattgattatgtgttgtgcagccttggtatgcggagctggttctccgactcaaacattcaagagggactgatggtatagacttctcgcatttatgatgtgaatcattgactgactgatttctagggatcagaccattgtcctgtgtatgctgttatcaaggagtctgtgaaccagcccaaaggcgaagtaaacgttcgggatattctcaacccgccaggaatgtttcactgtggcaggcgtcaacaggaatactcaaacgagtgcgcattgcccgcttcggggcgtttgctccccgaatttgacgttgataagcgcagaagcatcaaggacatgttctctcgaaaaccaaccagcgttccgtcgagggcggtagacctagccaacacaccggctaacattcccacgactcgagtcacagaatctacagacatgcacgcagccttcggatccactgactcggccaaaaagatccctgcgcctatcactgcgagaaatcaacttcctcagactgtttctcgcaaacgctcgcagcctctacctaccacatccgcgaaacgcaccaaatccgccgtatcgacgtcttctgggggctctgcggcaggccagaaaatgttaacaggcttcttcaagccaagggctgttatatctgaaaccacccagtcacctattcctttatcaggatcctcgacaccatcactcaatcccgaaccatcaggacagtcacaagagaaggggaaatatccagagatcagcctgcagtctccggggttacaagaagaaagcataagagaggaagctgatatttctaccgaagggccaacggccaggaagttcattgacgacacaataattgacccgattgtcagcaaggaggattggtcaaaactttttaccaagaaacctgttccaccatgcgatgggcaccaagagccatgtattagattgaccacgaagaaacccgggatgaatcgcggccgctccttttggatctgtcctcgaccattgggacccagcggagaaaaggagaagggtacgcaatggcgttgtcccactttcatctgggccagtgactggaactcgccggttgcgacgcaagagcaataacatacatgtcccaggaaggcagatatcccttgatagccaacagagttactggaaattctacacccgagtatcgatattcatacgttgtaaatctagcgaggttgagccccggacaatccaaagattaggcgtacgcatgcataactcatgaagactgcttctgatgtcctgttgtcctagcaataatcaacgagtagggcactttgcatgctattcaaaaggatgtcatgtactcaaatgccagcatgtagcgggcaatccatagcgcaaacttcattgaagtctcccaggtctccagccattttccctagttccatttgtggactagtagctgccagtttctttgttctattgtcttctttgtttacctgggctttatttgtttaatttattgtatttatcgagttgatgtcccgattgggcatttttctttttttcgatttaatttcgttgtttgattatttattattttattattattttattattttaattagttaatcatttaattaattattatttcatgagtcacttcgtttgcccgttgccatgggaattcgagtcacgatacatttgagtcggaacgtcgacaactgactcactcccatattactcatagtttaaatcattatttcacaatgaccgagattatgcaattagaaacagacttcgtagttcaaagctatgtattttgtgcaaagtttggtatgttttttaaagttacatgtggcagcgggatacagcgggagctagtccccggatctgcagtggcacgcgccatatgcacatcaaccgtagcacagacagagctagtatagatcgaactacatagtatatcttcatgaactattaggatatactattcattgtaattattaggtagagcagcatatcaaacacgtaatgtacggttacaatccgaatggacagtccaagcatctaaatagacaaaatagtatacgacctgtttgtcgcactagtacttgatggcaaggtcacttgtagcatagtcatatccctccagaattgactttctttgttctactgctactatgcctaatggggaagtcttctctgaggatgagaccttgtgattggtgtcgctgggcaaacaaagaaacacgtctctcaccccgccaaacaaagaaaccacccaactcggcacctaccttgttctgcgctcccagcccctccgggactatatttgtttacctcgcgccttgtttcttcttcttcctcttccctctcctctctccatcccgttctctttttcttgcacttcacatccaaattttctatcttactacatttcattacaataactcattgtatctatcttttcagttaatcttgttcatcatggcgaataccctctttgagctggttggtgaggacgacgacatgtctcctcgccgtactatggagctcctttgggcagatgccgtcgcccatcttcctcagactgatggtgaagtgttcctgccgcgcaacgttgttgatgacgtgcttgacatggatcttctcatggacatggcaacccgccttgcgtaagtcttgaccagtggctatttggaccatgttattaacgagccataataggagcatgctcaacaagaaagttgacattgttctcgatgaatccattgatgcttaccgcatgttccccaagcacatcgcagcggagaatgatgaagatgtgtgggttgaatcgcatggccttgagctcgatgatcaccgtcggatcagcaagtctatttacaatgctggcagctctgtgaagctccctgtccgtcctgccaaagttcctcgtccccccaactgtttcattctgtaccgccaggccaaccaccacttggtcaaggatgccaaccctggtgtctccaacaacgaaatttgtcagtctcctccaactgttcttgtcttgtttctagctaatgaatgaaccagctcgtatcctcggcgcacgttggaacaatgagagccccgagattcgggagcagttcactcgtctagctgatgatctgaagcgggagcacgctatcaagcaccccgactatcagtacgctcctcgtcgtccctccgagcgcaagcgtcgcaccccccgcgcccgtgccagctgtctgcctgtcgcccaggaagattccaactacgttgatgtcgatgaccagttgatgacaatcgatgacaagtttatgtctgagttgcacagcaacggttaccttttcggtccgaacggtgtcgagccagtgtccgcccctttcaccaacgaagaatgcttggaaatgagcaatgagctgctttcaggcaacgttcttgcttctctgccatacatccctatgttctaaatggcccttgtaccttgaccgggcgcgacaatgttgacaatcatgcaacaattgtctactttcacttcttggtgactctccggtcacgatgagattacaccgataaatctcagtcatcagactttcttttcggtttctactacgactcacaaaaaaacaaaagaaaaaaaaaaaaaaaaaaaaaaaaaaaaaaaaaaaaaaaaaaaaaaaacaaaaaaaaaaacgaaaacaaaaaaaaaaggtccctttgcatgtattttggctcatgacaagttttcaggaggagagtcgactgggtttctttcccacggggttttcctggtcgctctcctcctgccgagtgagcattgttctgtacctaacttgaaatcaattagtgattttctcaaacttctttctctcttgtagcacgtatattctcagatgaatatgtagaaacgcatctaggacacgatcgcaacctcttggtatcacaggtgctcagtgacatacttcgacaaccaaccattcccaaatcctatgcttaccaaaattacgaaccagacaccctcagtttctcactcagaatgccactgggcctatttcactttgatctcacagctcgactacacagcgacgcccagagcctcgagtctctgtctttgtgcatgaggtgacgtctcgatactctttgttcacagccgccgctaagtcggcgccacccgcggatcggcatgcactacatccatggttccaccagtcgggtatggaccgagggagacaacgcttggcatgccgcgtcgagcaagggacatccatgtccggccatgcgaccgtgcgaccgtgcgctctacaggggtatctatatctaccggcgctaggacatggacatggacgcaggggagtggatctacacatatacaacaaacgcactacaatgattcagggaactgggtaagttgcttgtattcgctatgggaaatcaaaacaagagactaactacgggattagggagaagagcccagaccgaaaaacgcaaagtgcgagacggacgaagcaaaactcctcaaaattgggatgtggaatatacacagacagccaagagcgaaagacagatgcgacggtttccctaatcttcctggtatgagatcttgcgcatttcgcccagacgctggcgggcgcgagcgagaccgttctcgagttggaggatttcgacctgttgggaggagacatattagcattgcatggatgggatataagggggaaggggacgtcacatacctgctgctccatctcgcggaccttgaactcgtgcgagctcaactttccataatcctctccgtcatcgccgtcgcgattcttctccttaatgatgtcctgcacttgtcgcacgagggcacggcaagcagcacccactgccttgctggcggtctccaggcggtcctgggtcttgctcatgaatgttgccttgacgcgactggctgcgacaagctgggcagtgctggctgcaacatcgttggaggcgacaataagttgctctggcgagttacggcccgagatcacaccgtccgcagtctcgatcaatgtgttggtcgaagaagccactgctttggcggcagagatcaagccctccgtccaacggttgttcttcttgtagaaggcagtgcgagacgagctaccacggccttcgcgaacaatctcttgctgggtctctgtagcggccttgatcagctccgagatcgcgttggtgacggcaatagcggcggcaaggatgacatcgttgatgcgcagctcgtaagtcgagaacccgtcacggggcttgttcttgagcttggccagacgctgggcagctgcgtcaatggcatcggcggccttgagcagctcctggtcgacaagatcacccaaatcaccactggtgctgatcttggtattcttgggagcgaacgattcaacaagcttcgacagcgcctgcaagtcacgctggacttcgaggttgttgttgatgacaacatcagtcttttgcagtggttccagaccttcgagacggaacgactgcaagctacggaagaaccgaacggtcgcttgagcagacttgcgtgcagcattaaccaggtgatcggagctcttgtcatcggtagcgaagcggatgaggcccttggtgttgctcaacacatccgagacagatccagagaagatggacactgtgcggataatctcggcatgaggactattggggccatcggcaacaaagttgttgaaagctgttgagaactcagtggcggaagctgacgccttttcaatctgcgaaaggacatatggaggagaggcattttggttaccggcctgcatggacgagtccaattcatacagagcatcatcgacacgctgcacaccagtctgcagcacggagtcgataatatcgttaatcttcgcgactgtaccgtgaagcacagtgtcaatctggctgtccagcgcatggtcgacatcgccttggctctatagttgactgtggtcagtatgcaggcattcaatatcatcaagatcatcactaaccagtctaagctcctccagttccataagagcctgttccataccagacttgtacacctcaatctcctcgtccttctcacgaagagacaggtcaagatcttcctggcggtcattgttgcgactggaatgttcgtccaatgcgcgcgttttaatctataaggtcagcataaatcacacatctcagcaagatggacagttactcactcggagggactcttccaaatcagccatctcccggttatacttggacagcaaagacgagatctcggttccctttgagcgttctgcattttcagcacgctcaagagccatacgaagctcacgcttgaccttctccaagtcatccttgttggttccggtcagacggtcacggtcgtgcagagcacgatcacgttcccgaatcatgtcagcaagctccaagttcttagtcttcagctcgcgctccagcttctctcgtcgctcgattgcttcttgtgcggaggctgccttgagcttgaggctctttgtggtctgcagaagatctaggtgctcttgtcgaagctgtgagtacagtttggccaatgcctcgtatttggatctccaggtgttcacctgctcttgcagggatcgaatctgatcgtccttcgaggcattctgcaagttcaggttcgaggtcaagtggttcatctgctcctcaacctctttgacacggcggtcatattgctgcagcatcagctggtcgcgctcatactgtgcacgggcgttgagattctcctgctccagctctgccagccgaccttgggtttgggtctggtactggtcgcggagaagctgttcctgtgccaatcgctgctgttccgcctgcaggcgctgctgctcctcgaaatcgttctgggcttgctgttgggcaaggagttgctggcgttgctggtcctcccactgttgctgcaagcgttgttgttccgcctcgtactcttcttgctggcgtttagcttcgtttgtccagaaatcattgatcggctccggctcagcagcgaccttcggtggaggcgagggctggtgttccacttctttcgtcggtcgtctgggaagagctgggcgatcgtcatcctcggaaagcaaatttggtggatcttgtggcaacttcgggatggtgatgaggcctgttaggtagcgcaggttggaacactcatagtagaaccgaacaaggcggtgatgctgggcatcatatcgacctcggagtggctcgagagcttcatcctctccggtggctacaggagacatcagtcagcggctatttaacgcagattcaaggaccaaaggccacatacttgtgtgcatggctcgcagcatgctggtgatgaacttgtagatgccataactctcctgcacaagtggcaccaatgccgagattcgacattcgttgttcgtgccggactggaagttcgagaagatgagcttttggaaggaatcaatttgatcttgcaaagacatcaaatcggtgatggtctcgtagctttgtgactgtcaacacgtttctccattgtcgcaaaaaccaggtatttacgtacccttcgttcggatcattgatcaatttcagactaatgtactcctcatattcaaacaagcctgcgactgtcagacccccgcacttgacagaactcatcgaccatggacaacataccgttgaattcggggtgattgcgatggaagttcagtttcgcctcgaggaagaagacatactctcgaatgagcggcgcatatcctatccataactgttattataccgtccgttgcatgcgtcgctactcctcgggcagagagcaattgcgcagtcgtcctgcgtggaatccatacctcgaacgccgtcgcctccgactcctcgcatcaaactatcaatccagttggtatgttgctgcgcctcacggataaccatggggtggccctcctggagaaccttgtgtattgtgatcagggccttgaacgtctggacctcgtcggcgaggacgggctgcctatgaagaacgaagccgtgtcagccatatcgagaacaatacccctgaccacgtctttcaggtattccaaaacttacactttcatgccagcccagaaagccgccgatgacttgtggtcccacgtatagacgatgcagcttcgcacatgtttccctacaggcgcggggggtggtcagttcgattcggacggggcaaagccgaggcggcatcaatcgtttcgatggagggaatggtaatattgtcagaacatacgtttgggagcggtttcctctgttggttgtcaaaatgtcagtcatcatgtcctgtcccccgtgtcggtctcatccccgattgactacttaccgatactggtggccttgcggatattgatggccaaatcggcctcggtcctgcgcaatcctttatcagacaaacactctcaaagtcccatgtcggtcttgcttaccgactcatcgtggccgttggggtgtgtgctcaggggggaggagggtgtatgaaggtcgggaaggtttgtcgcgttgacaagatcttgagcccggacagcgcacagacgctaagaataggttgcgctgaccggaataagcggatatttcgaatcgcaaagcaaaggcgaaaaagacacacgtgggagtccggacaatgacgttgatggggaacgggaaagttggcgcctgtcgggagtcttggcgacgcctaagccgatgcgggtttgggccgcggcttggattctaaggcttcatccctgacgaaagctgtctcggtctacgcctcacatacacactccaggctaggcagaaggaatacatgggctattcatcatggccgatctctacggtgtgcttggtctacttcgttcgaaacgacttaagatcggcatggatatatggaatatcggaggattagctacatacataaagaagccacataaaggacttgggatacactgtgcgagagagcgatcacatgcggggataaccaacccgatatggagactgctatccagcacagcaatatggccaagcagtcgaaaaaaaagtacaaagggcctcgccatccaattcgatggtcgtatgatctatctataccaagggtccttggtcctcggtccttcccctctttcgtgtctgggcgaaggcaacgagcattatggtgagggtgtttctactctttcagtagacgccagggtttcatgactgcctggagttgaagagggcacctgttcaacagagcacggcgattcaacagcaggcaactctccttgctcctccaaccgtccttgcccttcatgattcacctcgagctgctcggcctttggtggtgtctcactctcaacaggagtcggggctattagactggagtctgactccgggtccccaggggccgggctatttggctcggactcttggggagcttccaccacgagaagttcgtcagtaccttggttaacacgcacttcagggggcattggtttcctgcgtggtaaagttgatggtggggagtgttggtctcgttcaggcactgtgtgtgctgctacaggtttacgcttgggcaattttcctgagttcctcttcagggcatatttgtctgggcgcggcaatggtgttccaagtggtggatgaggatggccacgcccaatcggttgggtaagcgtgcctggaggagtccgcgacgattcttgaccgtgattttggtcacctttaccaaacacgctccaactccatttcttggcagcggcggtggcttgcccgagagtcatcggacccgaaggcttatcgtcggaagatgtaaaggttttggtgatagtttcaattgtgctgcgtcttggggccgtatcgctgacaagggacgtggtggaactaccccgagagtttctcgagctggggaagcccccgctctccatgcgagtagaagaaggtctttgaataaaactctcatgtggaaaacgaacgctgtcaatagaatctgcaatcgatgacccgcggctatggagcgcattttctggtatcataaggccacctgtaggtggcgaggtgcccggggtttggttcggggatgtaggtggggaccggcttgatatctctatcatggcgcttgttgcatgactcttttcttcgcctttgctctccgaaacaagcttgtcaaccttggcattgtccgctgtgactacgggatctgcagcgtgggaaaaagtctgtgaccgaatagctcgaggcagcggtgtgctgcccggtctctcaacgccagttgaacttgcagttgcagtggaatcgttcgattgcagatccgatagggaagatttcacgcctttgcgcagcttcttcttgaccgttccggaatcagaaaggacaggcatgctcatcgtgcgatcgtccttgaccctgagggcttcaatgggattactgtcaacgctctttggggtcgagggagctacgccagattcatctggtatctctggtatctctacctgagcactcgactcgggagtgtctcgctgccagacaccaccgcggaaagcctggccgagcgtattatggaagggaacgtcgtcccagaaaggcagaacgatgctctctgccactgcttcgcggatcttactctcgatcgtgcgaaggatgaggctgtatgtgatttgtttggagctgacaatgggttggatgtccatttccatcttcggcatcgtttcgaaagacatccagatgcgattgctaggtgggggcttgaagcgtaccaacaaatggccttcaagtttcttcaacacaacggcaaggacaatatcgacctctctggccttgaatcgagtgcctaagtcaatacgcaccgtcgccgagatctcgacccggaagtttcctgtgtattgcatatcggcttccacgcagcaattgccgtccacagtcaagtccttgagtcttgggttggtgataaatggagccccttcacccatatcaattctctgtaagccgatcttgctgataaagttaggtttgttggcgcgagagatcttcttgacgatcttgctccgcacgaaagcctcatactcaggtgtccggtacatcgctaaaaaccaccttccaaggaaagcattgatccaacgcgtctgcaactgctcttcggatgaatgcagacgctgaaccaaggtgacaatatgtttggtatcaaactcctggggcttgggcgggcgatcaggcgagtcccacagccggttttgattctgcagcatggcgatatagaaatcctccttctcagacaaattttcagagaagaggtaaaacggcggagtcggtcctcctagatccccaagcgagcccagtcgccgtgagaggcagatggcgtttcttttgagccacagctctccttctgggatatccccttctccgccatatatggtcacatcgtggtgagcaagcgaaatgacataccgcacctcgacctgattcacgtcatcataaagcatcaagtggccatgtctgagcacatatcatccatcgtcagcaattagcgcttaaatagcagcctatacatccagacaaagagatgcataccggagaacaatgtaaaagacatttcgcgcccgtttcgtggtctttccattcgccttcgccggatcgatgctgggtgcctgctttcgatcgaacagactccggtacatggtctgatacacgctaggactttcggccgcgacgacttctcccgcgggtgtcgttctctccgggggtttcccattgacaccaccgggtacatattcacgacagacggcaaagtatccggcagcgacatcggactcgtgcgtgcgatggaatttctccgccagctggtctgtgccggacatgagactaaagtcgtcatcggtgggttggcggaccggatcgggcgctttctcgcatggttgcggcggttgcggtgccggtgggagggtcagataggcgtagaggagaaaaaaggacaagactagtggaatgaaagtaattccaccgagggcgtaaacgaagaggaagctagcgagcgaacccatcgggaaccagtcgatcaatgcgggcggatcgaaagctccatagtttgggagagcgacctccaacagcttagaaagaacacggcaaacaggaagagaccggctccggaataaaacgagcgatgggggacaaagaattatcaggcacaagtgagtgagttgaagggagttggtagcttccaaagtcatgacgggatgacgaaggtcaactgtgttgagacatcggtattggtgttttgtatctgtattactagtaaagtacttgctttagtaaatgtaatgctgtatttatattgtatttttaatacctactataatcttacctgtagctccgcttgtaccccacctgaatcaaccagctgtcaggaacatgagaagaatcctggaaaccaacaacctcacctgttactgttttagtcaattccaattgtggatggggttaatttagcctaaaatgggtattaaagaccttagatcagcgaaatagtcgataattctcctcttcatgcagtgcaacagtgactttaagacccgccgatcagataatcctgcattctataactatagacatcacactagcagagtttagcattatggacaagatctcaacatattttgccagttcttttatttagggttcatgtatgtatccatccatgattaagaactagcgtatataacatccatggataatgcgagaagagaagaaaacgttcctattggtgaagatcatatatatatatacatccaaccatctaagacatctaagtgtacatagcatatagaaaacaaaataaccgaagaaacaacagaaattgggcaagctgaaagacaagtatgtgtacatgggagcgcaatctcctctacttcctgcgattcatggtcttttcgcacatctcaatcagaccggtcttggcatcactatctgggaagtcgctgatggcggcaatggccttgtcagcgtattcctgggccagggcacgggtctgctcaacaccgttgctacggtaaacgagctcacgagcctagtaaaaccgagtcgttagtatcattgcatcaagcaaggtcacccgcgattttgaacacccaccttctgcacatcaccctccttgccgaacttccgtccaaccaggggaccaagctccgggttgctcttccacgcaaacaagagtggcgcagtggccaatccaagctccaagtctgcaccaactggtttgcccatctccgcctcggtgaccgtgtaatccaacatatcatcaacaagctggaaagctagacccaggttacggccatatgcgtacgaagcctcgataacctccggagcactccgtcccagaaccgcagcggaacggcaggacttgctgatcagactggcggtcttcaggtaggtcttctggaggtagtaggcaagtgtctcgtcggtgtagacgggtttcgcttcgtcttgcgcggtgttcttcagttgcatgaactcgccctccaccagattagcaataacagtggccatgagttcggtgacctcaggatcgcgcagacgagccagtgctaccgaggcacgcccaagcaagaagtcaccggctagcacggccatcttatttccgaacgctaggtttgcggagctattggcgcggcgtgtaacggcattgtcgataacatcgtcgtgcaggagagacgctgtgtgaatcaactctgtgatctcggccagccgccgttgtgaaggtaggatgttgtcatctcccacgagatcatatttgctctcggcgttcggggccacgagcgggttcatttctgggttggcgtcttcgaggatagatggtgcactgaaggaggaatcgacggggctcggtttatccgtgtaggtatggtgcttgcgagggtccaaagctgttgcttgggacatgaggagaacaagcatgggccgcatgtgcttgccctcactatgagtgtagtacttggcgaccttatccagagctgggtgacccgatccaagtaattgtcggatgttcttggtgaggaatttgagctctttcccaaccattctcaacgggtcgacggagatacctggaggcgccttcggcatacccttgaagatggcctgggccgctgtcacggcggccccaaatggtgaggcatcccgccggcgtgtcgggtggtatttgcgagattgaagagcaatatgcacgaagcggaggtcatcgcggaggcattgggaacagacagttgctcgtgatgagaggatcagcccggtggccgatgcagttcgagctcccatgctcaatgcgagggctcttcaattataaacgagagattccaaattaaaccataggaaaccaatcccagggaacaatatcgatgtgaggtgtctgcggagtccaaggacgaacaatcttgcgggcgggaagatttcgagctctctcgggtcggcacggacccggtacctacgcagccaagtatgactcggtgacctgctattgacacttctctacttcaaaaagatacgattaaggtgatattaatagaggacagtatagtctacaagtcattgatcactcagttatggcatacgattctaataaaggcacaatgcaagaaataattccagtataatagacacagaaaactgcgccggccatcttggtccccttcgtaaacatccgaatgaagaaccagaacaaggaaaacaaattgcacaattaacacaagggttgaagaaggccgctacgaggtagatacccatgcatgggaccagtgcggtagacggggaagaaaaaatgctgtatcgattatggaacaaccacactcctctttaaatggcatcgaaatcaccaccggcatcttcatcgtccatgtctccctcctggatctctttggcaagctcgcgctcccgttcccgagcttcttgggcactcttgagctccaggcggtgctggttcatggggaaacgcatagcctagatcgagtccatgttagtagatattattttagggatgttcagtgagagacggaataacataccttaacactctcatcgtggagggccagacaggcgcggatacgctcgtggaacgcctcgccaggctctctggtggcatagatgtcacccacttccttactcttcatgaatccgtgctcgtgatcaagcgtagcctcgataacaccgtctcgaatagccttggccacaatgtactcggcagattcttcgctgtcgagtccaaggcgaaggcaaatatcccgcagcgagatacgagagtaagacagtgacatcatgcgaataccggtcttgatgacattctgccgaagacgcaagatcaaggtgtatgtgccatctttccggaaagtctcactgtaggtgttgacaatgttgaggaacccatccagatcagcaacactgactgcctgagaaagcaacagataagggtgcatggcccgttccagagccggttggcggaagactgcacggtcaggaatatcacccatcaatagctcgacaacgaccaacaacttgttagaggcctggtagaacccacgagccaccgggctagcaggcgacttacgcgtagccccaatcagatgactatgggcctctgtgtattgcagctgaatagcacggatgcggccgaggtagaacagataccgagcaatctgattgttagaagcagccacggggaatgggttgtgcgagatcagtagatctgcctgtgagatatgagacgtggacaggtagttgcgaagcagcaaggtcatcacagtagcctgtgtatcgacatctttccgaagcacagccgtgcgaagcgccgccaacaatggctggcggatagtggtaacagccgctgcaggagaaggaggaagcggagcgatttgctcgaagaagagagagtagtaaaagtacgcgcgggcggtgagagaatccagcgtacgacggttcaatgctcgcaggcgctcgatcaagtttgtcgagaactggactcccttctgaatctctcgttggtcgaacaggtatatctggacgagaatagcaagatatgcatccacctcggcaagggtctcctgagcgatgggattcttatccgagtcaacttccatatccgaactagctggagcattttcgaaagcattggtttggccaagagcttccaaaaggaacgaggcggtagagctagaagcggaataggtttccacaatgacttcggcgaggacctccggggtgaggtgtttccgcatcgacgatatcgatcgcagaacacggagggtaaatctggggtcgaaatgggcaacggctcgctcgagaagggtaaagttggatttgatgtctaaaagcatgccggacaaacagacatatagttagacatttggacttctttgagcaacaaggaaaactagacgaaccttgaatcgccttagttgtcgggtcgacctctggctcggtggtctcgacatcctccgcaccttccatcgtcacatcgtcctccttatccttgccagacgatttggaacccttggttgggggcactacaacagtcatcttctcgttacttttgcggtccttgctggtgctggatgaggatgtaggcgcacctgccgtatctcccatctcaacatcttcggatccattcacaccgttctcggttgacttcgatccgttcgtatgcgacttatcatcgtctcccatgttgccgtttgatgcgccttttgcgtctttcttggccggagctgacttggccttgttggcggcggcgcgagtagtgggcgccttgtctttcgcacccgggctctgagagttcgagtttgccttttcaccgttagcggatgaagaggtgtcggatttattgtttgatcgcaaagaacgcctttcggccggcatctttctcaagctgttgagctcggctgggcagccaccaagctatggaaggagtagggggaagggcgagtgagcacgatgtgaagatagaaagcggaaaagcaattccaaaagagccaagctgctgatatcacgagtctcgatgaagaaaaacttgtgtggacagatggatgaagtggatgggtgatgtgatgtcaagagatgggatgaacgggcgcgagagaccagatgagtgcttagtcagtaggagcttaccgcagcctcactcggcgcttttgctgttgaagctgttacaaccagaatatattgaaagaaaattggcaacaatagaataagaacaatctgtaaatctaaactaaatcagcaccatcgtatttggtcaaatttagcttggctagatgcaattactgatacccaggcatattctgaatttaatgcctcaggcatatatgcagctttccgagaggtaaacggtgcggtgcagtgtagagcgttcaaccactcatccttcacgatctaaggctctcaaaacacccacaacatgtcattgctcaattctcacctagaacagattagactctcttccaatgctatcgccgatttgccgttagtgcctatgatctccctcaaccatgttgctttgactaacgcaagcaagcattcaggttccctcccccacgtattttcaccactgcactgctgggctctcacgatataacagcattgattcgtgataccgaagcccacgaacgagcactcttccaggttgacccgtctaccaaagcccatggaccacaaagacgcgccacacgacgcgggactatgttccccgctgagaccgaaagggagtcaatggcaagccgcatttattcagcgcgggacaagcgcaaccagtctgcagtggcaagggtactgggacatgatatgatggaggagatcaagcgatcagcgggcacctcgactagaggaccccgcggggaggtcaacattgaagtgcttcttcgaggcgccgagatcctgtgcaatgtttagtgagtgctatatacctgataacaagtattgcttgatctaaccagctcaaagccccgttgccggtgcacaggaaaaaattgccaaccttcgctatcggcatgagatgatcagtgagtccatagcgcagttagaaggccgggttgcaacgaatactgcagaactggatcatatgagacactcttatggagatgatgaagatgattttccccctgcaccggtggcacagccagagattccagaggtcactgatgaggatattgaacgggagttggctgaaatccggggcttggagcagaggaagcgaaggctcgaagaacgggttacaggcatggatcgagatttgggtggtttgataggctgagcctttctttcgcgatggttatattcctgccttatggaagaccttctactgacctcttgtctgcctctctacccaccaaacaaggacatcatgctctctggacacctccggctggataccacaactctatctaaatgaggagctctccaggttgatgactcgtccctggtttacactgccctgaccattggagacaatagggtctgacaagttgttatacttagccagaatagccttctcagttctgcatgctgctcatactgagcctttgtcccgagtgaggcttacttttgggtcgcttctaagtttcaccgaaaatgcgcctgacacctgcgtcaaggtcctcaccacccacagcctctggtgcccgtcctatccatgccaagttccctatgggagattttcgtgatacatacagcttttcatgttttacgatagtcatgaatatcaaggtaaatccattattcacgatattattactcagcatcaactgggttatttacaacgtactatagcagaaaccacgtactacatactagtgaatttcctctgttatttcttccaaggcatgtcaaatatggctgtgagtattccgtatctccaaaaatcatagaacggcctacctggacaaaagcaagcgcaggcttaaccccgagttcatatagcgccattggcccgtttgggtgtatgattggagaggttgtgagcacagtgcaaacgttgcttatattaccgccgtgacaccaccgatgcccgtacctgttaccatgtatatagatatgtgaccagcggtcgctattaggcggctgccagctacacaatatcatcatctcttccctcagctatcaatgcaatgaccggtagcatgtcgtggtatatgaccaggcctattatcttcactctgcattgatcaaatccctagcggtcttgtggttcttatatatcttctctccattcactcagatatcatccgggcgggggggacgcagttcctaggacgcctgcgaccattgaacagcttcatgatctttatcttgctctcatttgcgattgtacttctaataccctgttgctgctagtgggtgtattggtctacatggatcatgcaaaggaaggaagcaggatacacgcgtaacaaggatagtcggccgcttgtgtagcctgtcatgtcttctagtggtctttttatttgtctttttatttgtctttttggatgtctttttggatgtctttttttcgggtatttctccccattctcgatcacttaacaggcttctcccagagccttgaatttttgtggaatttcagaaaagttcggggcatgcaagcctaaaatatggtcaataacgaaccaatgaccgcgatgttatttacttcttcgaaaaagcaatatggccaggcccagcccgacctagcccggcctaaccacgtggtttgttttgctttttgctttcatttggtatatgtacccccgatcagcaagaggagatgtaaacagaggcgcaagacaacaaagtgtgtgcgagcactggagttgcccatccagcaagcgctccgtggggtggaggatcagtcttagacagctgagacatccagtagcagttcttttatagggtcagagagaatagctgtttaacgtatataggttaattggccctaaagccctgaaccgtcaatcacgtagcatctacacaagaatgtgacaacattggacctggctgtcctcgacagcaatgaatcaactagatgattccaaaatggcatttttgagtatattaatggttggagttgtatactattttgaatgagcagactggtgtaaaggcggtttatcagaattcgctgtgattgtctatagatcagtgaccaggcacgtgataatggttcgtgctcaggcttactcctgaagttgaccatgcgatatacagcaatagtacatagactagttgatctaaagtcgaagaatatcacaggcaatcaaaaatagccaaattatcatactaaataataaagatatatgaatctgcgagattgtagtttgaacatctctgttataaaggacggatgccaagaccgggcccaacctcatccgccgtcagaagtcgtaatctgccaaatctgaggttgattgcattcgaacttgcctgctctaacatctgcgcgatagactacagccttgcttgatttctaggcaacggcgatcggctatatatattaacatagaccatttcgtgacgaccaccctgtctccaccattcaactcctgcccttgaatcactagcagagtaccagcatatcaactcggatatggatgggtctcagggccaagttggccagccaatgggtgtcccgcagcagccacagcactcaaatctcattcgaaccgatcaagtacagaagctaccgcacctcagtgaccagcagaaggcccagcatacccaactggtgcgcagcctctgggatatgttgaacacccgcgatccacagacccacgaataccaacaggcgcatacgaagctctcgcagctctcacagaacttgatgaaaggaatgcgggttttccagcagaatcgacagcaggcaatgcagcatcagcaccagcaagcggtgcagggacagccaggacaacagccacagcaagggacacagccggtacagcaagctacccagggagctgttcagggagcgcaggggccacagggacaaccagtccagcggacgcaatcgaacaatccacagacgattaatcagctcattccgcaaatccaagcccgggtcagcgcgctcaatttcttcctgcctccgaacgtgactcccgagcaggtgcagacatggatacctgaagcccggttgcgatatggtatcgctcttcagaaacaagaggttggacgagctcggatggctgatcttcgttcgtcatatgctcagcggcaggcccagggcaatatgagccaggaggaaatgcaagaattcaaaaaccgacagctggcagctgaaaagctgttccgagagggtagcgagttcttgaacaagttcaaggaacagcaggaaagctttaagcttcaatcgcagcaaaatccacagaatcaagccatgaatcaggcaggacaggggaatacgcctgctaatttgaaccaaaccccagtcgcgcctcccatgtcaacacaaaacgtgccaaatccccaggcaggagcggcagccaaccccatgcaatcaggacaaactcaagccccagctcctcacaccatcaactcagcggtcaacgcagcacgccaaactgcaatgtctccctctacctctcagcctggacagccaccttctgcgcaatctgctggaaacactccagtcccaatcagtgcaccgctgcctcaagtgcaacgtccacagccatcccagcaaggaactccaggaggacaagtcacattcagccaaaaccctcatcctgacggttccgcccccacgccaccagggcccccccaacaggtgaaccaaggcccacctcgtcctctctcgcaccaagctgctatctcacaagcagcgcaaacctacaccaaccccacccctcaacagcaaacaatgactcagcaagcccaggctaaccagcaggctcacccccagggttatctttcaaaccgcccaggcgaaacttccacccgtaacaccaacatggcaatccccaagaaccttcatgtctccacccccgagcccgtctcaatgccaggctcgcgcccctctctttctggcggtcccagccacggtgccatgggtatgatgggccagcccgcgatccaaaaacaccctggctacgtcctggaaggtgaaggccagcgcgtgctgagcaagaagatgctcgacatcctcgtgcgacaggtgaccggtggcggcgaaggagaaatgctgactccagatgcggaagaggtatgtttgtcccgtttctccctttcacaatgagagataaatatgaaagaaaagatcggaaatattaatggtttcacagttcatcctccaaatggccgacgacttcgtcgacgaagtcatcacccaggcctgccgtctcgccaaactgcgcccttcctcgaccctcgagctgcgcgatatccagctcgtccttgaacgcaactacaacatgcgtatctccggcttctcgaccgatgacctccgcaccgtcaagaagccccagcctacccagggctggactcagaagatgtccgctgtccaggctgccaaagtcactcaaggcaagaacgagtaagatgcagatggtctgccatctgtcttttctgattatgctgcacacaacgcttttctttacgttttttcttctcttggaggtcaaatagggtgttttttctttcttctttttctttccccatcttactattttacccttttatattgtctcttgagaatatggcgtacctggtgtatgggcaggtctttcttcgcttctttcatttggccgcattcatggttgggacggggtcttcttggtcttttagttaggtccatatatgctttctggccgcccagtctatgcagtgcttggataatgaattttctatcctggctttcctggcttttctagatttgtttcggtccgtgtgctgttagtcttgtgtatgtatgtgctggccttgggctctactctacgtctgtccactccaatatagagaagatataggcatattgaatcaagccttactgcgcactgtatctaggtagttaccctctgtacagtgttactatcaagtatttactttaccatttacgaatggatacaacgaacagaaaaaaaagtaagttcccacgctgaattctgctaagttgatcatcctcagcagttaagaagcacgaatatcgggagacaacatgtggtatagtggttagtacagggtatggagagagactcgatcagggaagaagcaaatcaaagagaaaagaagaagaagaagaagtgggatacacaagagaggtacaaaaaggaaaaaaagcgctcgatgaacggagtgaggaccggattctgggcccgatggtattctttggctgtgagggcgttctttgaaaacaaaagggaaatgagaaaggaaatgaaatggttggtggaaagattggatcatcgatgtgacgttggcggaaaatatgacaataacactcattggactggagatgagacctggttatcatatagagagtgtggcaacggtatgttcgatcaatgagggtggaacctgtacagttcatgcgtgacccgcggacagtacagggtcgtggtaagcaatgttaaaaagaattaaagcgttcgagacggcgaagaaaagggggaaagagtcggtgaggttgggccttcaggccttgagtttggggctttgtccaaatgttccgagtaatgcaggcaaaaataaacaggaaacagacgaagaggtggagatgagtcgctcaacagtcaagagaaattatacacatgtcactcgtgaacatcagtttcttgcggaaagtgtttgggggaagtatgaggatgggaagatgatatgcctcgcgcagacccatgctgaggaaacaaaataggtggttctatcaagagcaacaagggggatatctcgctgaatacaaaaaaaacaagacaaagtgacgaattaaggtatcatggggatgtcagtatgtcagtcgctagaaagagctaacgtcgggccgggttgggagtcggaaaattgcgccggtcaacttccttgcctttgccgggtgccgatggaccgctgcgagggatgggaggcaatgccttgtctgatgctggagggccgtgtcggctgtgtgagctgcgccctccgacactgctagcctcgccggcttcatccacaatgggaagagtcgaagtcgggccgggacccccggcatctgctgggtcccaaacagtggctaatgttctaggatgtgtgacggacacgtctttcgatgcctccttctccgctgcttgcattgttctttcgacagaagaggatctcgaacttggcttttcagttgattgctgaggtgcaccagatgcggaaccgcgtcgtcgttcggcttcttcctttgacatggtgattcccttgatgaaattaatgaagcgctctccgtagctctctggcgggattggagaaatctgtccccggtcatgcgagagtcctttgaaaaagttctcgaatttcttggtggtcccgtaatgagtcaagcaatcaataataccgaggtaatagatctcgtcaccgggttggccattctcatgggtggctcggaaacctccatcatccgcgtagaagacatgatatttccgttcatcgaggatttcttctggcatcttcgcagctgccttgtctaatggaacaggccgttcacgtttgataagcatgcgcagctcccgggccttgcgttcattctccaatttcgatggagtgcgcatcaggttgttgggagtcggagccgtatcctcttcgcgattacctcctggttggaagacctgaagcgtcttgtcacgcaatttctcttcattgcccctacctgcatcatggatgcctaccagaagagaatagtccattatcttgagcctttgaagcaacacaacgtcgcgtttcaattgctcaaggaagaattctcgttttgccgggccacattctatgtgacggttgcgacgaacccagttgaggtccttcatagttgctctagggtttctttcgagatctgactcttgtagatcacggccaaccgtcgagcccttcaggtcgaatgtctggtggatatcccggtggggcgggaacaggttattcatcacgacgaagtggatctttcggccgtatgccatcttgactcggtgcaatccgtagaattgtgagatgagagtgcttgggttgttctccacgtgccggtagtactcaggaagaatcttccggagaagcttgtgctcggaatggtgaatggtcttgataatgtacttgtagtcccgcgagaagtaaaagaaactcccgctcttgccaggggaacccagttccgacaaaatgtacttgcttgtgagagacataaggtagtcggcaggatcgaggcgaaacttggcacgaaggtgtcggaatacccaaggtgcgtagtctttgaacttgaagtcgtatttggcggagggaatcagttcgttgccggttctgttactgtcagtcatatccaaattgtcaacattacaaggggtacacacatgtcaaaggagaacttgtgcctggcattaaagtccgccggggtgagttcccggtccattttcgcgttgattctcgagaccgtaaagcggataccagtcaacatgttgtatgcggttacatagttgacgtggttctggtccaccttggtgcccacaatcacccggtcgtcgtcctcctcttcgcgacgtcgtcgcgaggctcgcttttgtttgatagcttcggcccatcgggctgcatcttcatccggcggtgtctcatccaaagtgatatcttgctgggtgctggttttcgttgcccgtcgaataagaccgactgacgcgcgtcggaagccggtcgtcggtgacattcggccagtgctatacgcagcatcatcattgcattctgcgctttctcgtcgaacactaggcgttcttggaacctgcaatgaatttcgctgtcgcatattagagttctgcgattctggcacgggagcgacatcgtgtgtagatgaggcgggtggggaggcatgacgcggttggctgggcttcgaatttggtgccaggcgatcagggtctggagaaaaacggccggtctcatcctgctgcgggatctgtaagagcgaggccgacggcgagatcgaagactcatcgtagggcggataactatctccattgaccataagtttcccctgaacaggtcggccatttgcagtgccattgggttgttgactagaaggggatgtggttgtggagatagctcccggtccagtgtccgaaggttttcggtccagcatggcggacggccggccgttctcgcggggatccctgacgggcccattgcctaccgactgcatgctgccgtccttggacaggggcgggtcgcgcgtgtacgagccgacactagagcgagggccattcagggagtatgtactaccgttcttcaggtcggtcaaaaggttcctgtcattctgatgagagtcgttattcgcgtcgtcgccgttgggccagttagtccacaggaacgtatttccgacgggggtcttatcatgcgactttcggactgattcgaacgagcgcggatgagtggctgtggccgtgactgtggcagtctgataggagacgtcgttggagaagacaggcatattgaaatttcagggaacagggtgacgtgagttctgcgtggaccggcaacccgaagtgacggcagtcgcccttattggcggagatccaggaaagttgtgaaccggacggagaaaggggaaacaaagaaagtatagagccaggtgcccagggcgaggatattcaaccgatcaacatcactcagtcaatgcaagggaaaggggagattaagggtaaatgaggtggtgaaatgggggaaatatgggggggtgggaaggggaggaggaagatggttgtctgggagaaaagaattacacgtacaaaatgtacgcggacctccacttcacatgttcctacattcaatgattctatatattagatgttatgctatattctagtacggaggagacatggccacttttattctgattctttatgtagagaatatgtgttctgttcgttgtataaggaaataccaaggtattaggcatgaaaactcagatgtttgatgagcgtacaacatcacgtagtttagcacatcatttccatatattttcctcctttatattactgactactagtgaactagtatcgctttcacatagttactccgtactgccagtttcattctcttcaactctcaaccagttgcatatgcaaggaggtcgtgttgtacaactctatagaatacagtctctagggagtaagttatcaagagatacagttacctatatgttatacatagtcacctataataagatatatcatctactataccattgccctgggccaatacccatataacatactccgtactccataccaatacacgtggagatgcagagtggcgaccaattatacgccaatgagcctatctcctgtccctgaccttgtaatttcttgggtttagggcagggattgagtagatgttattgttcttctgcatctttttctactgtagatgttatatactccctatatgtactcaaagaaaagcaattgttccaaaaatagggctcaataatgaaatcttccgcatctgcgccacaggggaaattctccacttcaaggccaaagatacaatgatacaatgatacaatgtggtaaggatcctctctgaccggcatccccgtcgccgagccccgacctgaacaaattgaacatccgagccgagagaagagtcatactgtacggagtagaaaggtgcgatattataggtgcattcgtgtgcgaaacagactgaactgctaatgtccatatcggagctatctataaagacatgtgctcttctccctcacctctacggagtaccaattatcccaaatttcacttttcctggcatatttcgtagcttcaacccatggtccttaacatcggtagcgacataaccattcagagattgctatcatgtaccttgcgggagtgttacattgatatgtgcatgttcctgtatgcgaatggcaaggtaggatcgcacgtcctaaatcgccactttgtcacatgacttctgtagcccgcaaaaacacggatttggtagtgaaaatccccgttatggaaatactataacaagtatatgactcccttgatttgaccatctgccaattctatcgtcaattgtagatgtataaatcatttctaatactattactattaaatagaatactcttatgattctattcacgataaggcctcgggccgtgatctggttagcccccaccgagtgtacccacaaaatcccaagatcacaccaaatagcgtaagattgaatcaaatgggaatgagttaattagatttcccttcgctagcacttcctatttggcaacgatgggctagtagaggccgaatctacgaactacgtggcgtacttggccatttccgtcttagttggatttatgggaacaaagaaaaagcagctccaccgcaacctcctacaacaccatccctatagttcatgattctggctcaatattgtggctttaattgtagaatattgcatcatccgggaaggtcctcgtttggcgtgagacctgatttgtctcgtcgtgcactatgttgaacctactcaaccttttcgcatagatatagatgggcaagaagtaaacctatcagaattggatgccgatctttctaaggttgttctcaaaaagaggggaaagacacagcacaatctcgcaggagctaaagtagtttttaccggggtagttggtgcaagcagccatatcaggcaagaagaggcatctttcgaggtcattatagttcaaacacggcaacgccgctaaatgcaagaatccgggcagagaacttggaaaaagtatttagttcttgtgttgacctgccagcaacagtgtcacaactgcccatccttccctcaagacttttatccacgtgtttattgcccactatcatgactatacagcaatctcccaatgacagcacccaaaaggtgtggaaccatgagtttacctggacagataagcacttcacgcccgaagagctgctgccattgagacagcagaccgatgatcttgccgtcgatgctgtgaatcgactgcaggctattgctacaaaggcgaagagcaaacaaagcaacacgggacattgttttggtcgatttgacatgtatagtgttctgaaagaacatcatgaagaagacagtgtgctgcaagaactctggcaagaagtaaacacagtccctggatgggttgactggacacaaattgaacgcggacaagagtttatccatcgctatatgatccccaacattaccggacttgctctccagggattcctaggcggcaccgcagtgggtaatccttcctttgacatcgtctaacagattgctaacttcaaaagacaatcgcaggtggaacggaggtcatcgtcagaacggggggcttttccatccgtgtcctgcctagaagattcctcgaaagcttcctatggctattgcaagtgacaatggatctggagtctatcaaacccggtggagaaggacacacctcgaccgtacgcgtccgtctattgcacgctacagttcggaatcgaatagtgaagctcatggaccaagacccgacgtacttcgatgaagctaagtatggcgcgccggttaatatgagagacgcaattcatgcgacggctatcttctgctgtatgccgcccttccggcaactccctaagattggtatccagcctcgcccgcaggagacggaggatttcctggcgctgtttcgatacattgcctatatcatggcgactccgaacggcttctttgacggagctgaacaatcaaaggctactatggagagtgtcatgatgtgtgagcctgagccgacagagtcctctaaggctgttggagcgaatttcgtcgctgctatccaggattatcctggtgtcaatgtgtctaagtcaatgatcgaagttggatgccgtgtactgagcggcgacgaactggcagataagatgggattttcgcagcctgggatattttacagggcctctttcagaggatggtgccaacttcttgtggctgttaacgctcttcagcggttgtccccggcctttgatcaaatacttatgagggtgagttggttaaaaaaaaataatcgagacactaggaaaagaatgatgggttcaactaccaccagaatactaatggcttacagaaatcgaaagagttcgtgctcgtcaacgtgtttggggcgtcgattttgaaagaagggaacaaattcgagttcactcaccaaccacaactgaacaaattgaccaagaaagagactaagactgataccaatctctcctggttcaggccggtggaggcaatcgggtttgttatgttcctatttgaatgtcttgtttatgccctggcctttggcttgccgggatatgttctctatgcaaatggcatagtctctcgcacttttctacatgtccttggataatgtgcataaatgcttgtcaagttctttcgatgacgtgtgccacttcggtcacttctgctagaattacatggactttaccgtttcttaccgtttttatctaattatagaatgggctaaataaagtaccggtatccgatcgtaaaaaccaagtatattaagggcttgggactttagtatcaacaccatggtactcgcaaagtaattttgtgtacggaatatacgctgtactattttgcattctcaacatagattggactatctcaagggcagtagaacgccaagaagccaggataaaaataactctgacactgacacttgacacgggacagaatgtggagagatctaccgtttgtttacaactttgacataggtagcataactctacaatttcagctcaaaaatccaaaaccaatatgaattccagtaacgatggaattaatcacaataccaaggtaataagaagaccgcagttccccattgcaaaccccaccgcaggacgccatccactggactttggaaagaagcaaagcccataacaaagatatccaaaaaaaaaactatagagaaacaaaaccgaggaaaccatcagagccactgcgatcactgagtccaaagaaagaaattacaagagaagaacaaagaaaatcagtaccaggtactctccctggaaatgcgcacgtgaaaatatagggagagctcaacctggtgaaaaacaaaggcatcaaagcctctacttcttggtggtccgcttcttgggagctgcccgggttgtcgttgttggctgaggggcagtagtcttggtgatacgtccagacttggtctttccaagaatcttgggctgctcaacaatagcaggagcctggaatgtttgttagtgacagagggagatggactaaacatctggagtcaacttacgttatcggtagccttgcgggccttgccagagttagccttgggcttggtggcggtggtcttcttgaccgctgccttcttgggagcggcagtctttgcgacagtagccttcttgggggcaaccttgggagccgcggcctttttacaataagccgggaacatagaatacttccttgatgagagcttaccttgacaatgggcttagcaggggccttggtgacaggcttcgccacaggcttaggagcggccttgacaggaacatccttcttcgcaagcttcagggggccagatgggcctagagtgcgacgcgtcagttaaatggtcgagacatgtgcaacgaaatgcagaaattggtcaagtcgcgcaaaagagaatataacccatgcgcagggtaaatattaacttacccttgggctgagtgaactcatccttctcaacaccagccttgatagccttgttgaactgagagtcaaagacactctgagaagtgacgttgatcttgttgttcgactgaacgtacttcttaatagcctgacgactaaaacaggggaaattcagtcagtggctgctttctgaaatagatggcgcgagaatccagaccgatccccgaggcatcggtgacggaaggaaaacaccagaaaacatacctgctaccatttcgttctttcaactgtacacacaaagggcccgagtcagcaatgaaatccgattaaaactacgaaattgatttggttgtgccatgcccaaaggcaaagacgtgtcacggtcgggcgcgcgacccgaatcacaacaaccagcgcgccggcagagatcaactcacgttaataatggcatccttgatcatatctgtatcacccgaatcagcagatgctcgcgacgaaattcatgtgcatatcgattttacgcgatgtggtgggcgttcaggattagtagagacataccgcggtaggaagtgtgcagagcaggcgccaccttcttggacgcgctggtaaccttcttgggaggcatgattgatgattgatttgagaagaggatgggatgaagaaggtccggttatcaaaagatgagaagacttgagaaaaaaaaaggtggtgagagtgaaagcagaagaagaaaaaaagagcagaagggaagggaaggccgcggggcatccgcgatttataggcgaccggtgttgacaagatcatcggagagatttagaaaaaagcactttctttgggtttttccttcttgcaagttgtcgtccagctggtttttgtttttaattaacgtggtgtttctcttctgtgtgtccttgcgagttgtctctttgcgtgttccaaccttggaatggctgatatggctgatgtctacaggttctctctctttcgtatcagatactgcaatatcatacattgttatatttctttcgatctctattggaatacctaaagactttgtgatattataacgcgacaataatcatataaactggtgaactggtgcttctacgcgtcccctttcccctcgatagaaatcgcgcatactctattttggaggctttgagggcgagccatatctctcagagtagggcagagggagatcatctgttatgcacattccaatgctgtctggggtaacccttccctcttgttgagccgaatctgaacccttgaaacctagaatctagtcgcgaggaacacagttcggagatatagtatgaccttttatatctacaacgttccttaacgcatcaaagcctccttgcttggaggggaacctggggaggctgcattgcctcgtgctaaaaggtcacgttgtaggtcaaagacctgtgacttgtgaccatggtaccgccccttaatgatgtcgagactcgccttatacgaacaaccttctatcttgaatcaagtagtgggtgggaaataggagatggtacttcagatctttttgatcatgtagacaataatgggaaagatagtagctaaataagcagacactccatgtaatacggataactatatatattatcgaaactaacaagacaaattatatttttctagcattccatcataccggtagtatctagataccataaaccataacaaacacaaggtttatgaagcccgaacttcgatcagaacccgggtggcacacgataactccattgtatatatccaagagaggggaaaggctctcacctcagctgcaacgccactacttaatcacatcgggatcaccaggccagccaatcaaagacgcggaatagccccaattccaccattccccgctgatacgcgcccctaaagttaccgagaagaaacaagaaaggtggccgggggcctgggatcgacccgccacagatgtatgagggaacgagcgcgtttgccccaacgtcgaaccaacacagacggatagtaatgaggatctattctcattggactatattcccaatttcctatcgcatgactctaattattggcccatcggcgtagctgggtgacggggatcaccgtatctgcatccgcaaccggcgcgtcgaatcaagggctcagctggcgtaaacgctgatcctgcaccacttaaactctttttgcatcttttgatggtggagattccttatggtacctggtgtcagtatatatcttctgcattcgaagtatttgctgctcatttcgtgaagatcagtcgtagttggtgttgtgaggcctcgagtaatctcgctaatcgggcccgatctatacagcctggacgcgaacactgattatggacacccttgagatagctacaccagagcatctggaaaggagttttgatatgctgaagtgttgagaacagatggaagataatgagtatacagattttggactcttttcccaactgtagcccccaggatcagacggaattcccatgtctgctctacttgatcttgtttgatcctgacgtccaacggaccgaaaatggttactggaacaagagagaagcatcggagtacatatttcttaagttatatttcaaatcagaccaccttttgctacgatacaaggaacttcatgccttgacccgatcccgaggcgaaacggtcattttccgcaataaaaaaaatccttatgcataaacattagaaacaataaaacatataacgccacgccagtccagctcatgttagatcaggaaaattttgtatcataagtacggaaaaatcatctctcgtcatcaagagactaggccgctccacgcggcttcgacttggcatccttcttagccttggcatcttccttctttttcttcttttgctgctgcagcttctcgtcgtgcttgcgcttgagagatgccttttcgtcctcagtgcgagcgacgggcttgaagaatccctccagtcgcgactgctgagctgtcttgagatgcttcgacagacgggcggcaccattgcgcacacggtcctcgttgaagcccttgtccccaaccaggtactcaatcaggccttcaacgttgggagcttcccacttgaagtcgcattcggggtcatcggcaggccggacgtcagggtggacaaaaagttctcgcgcatcttcgtatggccagtcctcaggaacgacaaatttcttcttcgggtcgttcttcatgaactccaggactttctctagagacttgtgctccttgatcaggctgagagcagtggtggctcccactttgggaataggctctaggtagtcacagcctagaagaatgcagagatcgatgaactagacgtagttagcaattgtgactgcgcgtatcataaccagaatacgtacctgtgggcggtccatatcgagaccctcaagcgctcgatccaagtggatctcctggataggttccttgcgctgctcactgaatgtcaagtgccgcaggagaatcggcgactcaaaacacaatgtatccatatcctctgatgcagcggcgtacaccttacctgcacgagccaggaccgcacattgtgcttcggcctccgtcggcgcgttaatataaggaattcccatcagcccaaggagctttttgcactccgcattgtgttcacgagtaacgcggacagtccgccgtgagaacttttcgatatcttccgcagttccagtttccttggcctcttcatgggcctcggtcgcctcggccttgcgtgcaacacgcttcgccaattcgccagacttgagcttcggcggcgctccatcgaagacgtaaagaggtttgatgccgttgtccaccatccgcagggtacggtagaacatgcccattaggtgggatgtggtctcgccagactcactcatgagctgttgaccctccgagcgcacggcgatcaggaaactgtagatgctcatcgacctattctgggttagattcttgagctaccgggacgatgatcgaatgacgtacgcatcctaattcggagagttcatgtcagcaactgaaaatatgtggtaggttatacatttcatacaattgcgaccttgcggccgaagtggttcttgatctcgcccgtcttgatcgcatcgggggcattctcggcgattacctggtacaggtctggtatttatttagcaagaggtatggataatcgggaatagaatacttacgtttaatacccatcttgaacgtgagcttaggttgtctcaagttgaattcttgtgtctgtgtagaagttgagcttgacctgtcgcagtacgcgaacgcgctgggccggaagcgcgacaccatttaaacccaattaggcatagtgtcatgcaatatcacgtgaccggtcaaatccggacccactcctgtcttatcttggcctgaatatgcatgtctgcctcaggcggccaaccggcaatgagtaattattcgggccagaaccggccggtgtgaagctgctccgaccccgcctttctgtattccccggaatgcgccagaaggaggatgagtccaacctccacaccaatatgaagcggaatcgcattcaattcgaggccaatggcgaggcctcgtctgcttctccccctcagggtgtcttcaccccggaggaccgccctcaccatgtgccgaagatatctagacggatacgggcatgcactgagtgtaagcgacacaaagtgcgatgtgatatgaaggcaaccgactcggtatgctcgcgctgtcagcgcatgggactggagtgtatcgtgaacaaaagtcttcaaacattgctggaggacgaagctgagtaagtgccttatcttgggtgtttacatcggtgacatatactgattgcgccgggttatgataggtggaaatcaatgatcgaatcggcaatgacggacctgctcagaaaatcgcagctaccggagctatcatactaccaagcaggcggtggtacagagacaccttcgaacaagagaggccggaaagactccaccgtctcgactgatgatactggacttgggcaacataaaagggccgagccagtcggtaatacagtaaaaaatggcgcagctggaaggtcaaattatggcttctcccaacaacagccacgatattctttagaccgcgaggaaactggcgcaacttctctggtcacagccccgatgggcagtctgtacgaggtgacacagctcagtgaaaaccgcgagagctcgcccggacaaaagcttgccccggaccaagtattggtcactgatctcatctcgcgcggagtggtcgatatccaggaagcggaggagttgttttatcacttcgaccaggtactcaaccgttacctatgggatggagccttgctagcacataaagacttgacgtctgtccgacgatcttcatcaatgctgtctgctgccattttggccgtcaccgcgcttcacatgccgaccaaggaacgcacgtttgatacatgctacaccgagtttgcaaaattggcatcagagtctatgctggaccaccatcataccctagatgatatccgcgcactatgcattggagcattctggcttgctgatgttagttggaagctctctggctatgcggttcgtattgcaaccgagcgcaacctgcatcagttctttcgcaaagccacacaagggtcgccagaacacatggaacaggcgaggctatggtatctactctatgtgagtaatatttgacccaaagtgttgttgttgttgctcatagttttcagaccttggaacaccacttttctattgcatacggccgaccaccgatgatccatgaagatgtcagtatcattcagcacaatgtctttacacaaaatccgtccatttcacaaggtgatcttcgacttcatagccaggtcgacctgttcatcattctcacccgaatgtattttgcattcggtccagatgtcgacctagaagttccagagagcgatttccccaaaattgatcaatacgatgttgatataggggactggaagtcagcatggcttcctagactcggtaagtctgacttcctgagacacagctacattgtctaatatgttactacagcgggaagtcgctacgtcggtgcatatccatacaaggccgtgtatatgcactatcatttctctcggctgcagcttaactcacttgctctgcgcacataccactcgtcaacctcctcaggacaaatgtcttatgaacgcaggaagcgtgctaacatcgctgttgaatcagccattgcgactctccaggtttgtctggaagagcgagacatccagctggcgctcgttggcgtcccactatatctccacagcatgatcacatttgccgcagtctttctgctaaagatcacagccaagatttgctcgaatggaaccattcccgggagccagggcaaacggacctcaatcgcctcggcagggctacacgttgacgtgagctacgtacgtgttctcgtcggacggatcgtcgagctcatggtctcctgtagtcagcgagcgagcgagcgccacctgagtcaccacatcgcccggggtctccgcaagatgctgactgggcttgaggaatgggagaagcgcactgctggtacccataccatggggttagctgcacatgaatcccattctcttttcaagccggtggtaattcctggagcgcagatgctgggtgagcgtgacactattctgaatcacccgcctccattgcttggtgtggcaccgctgtccgccgaacgcagcaatgggtttgaacaccctctgaccccagggaagcacgagcccggtctatcggaaggctcggttgaccctatgatggcggatctttggggatttgacgaggattatttccccacgggagtgtttgacttccttcagagccagatgccagcgtgatccggacttggaatgttttccctgggctgttctctttatacatagtaataaacggcctatgattgacgatcacggttgttgcaggagaatatatgaatattagaaacatacattagagtgaactactaattaagtcggactatatctccatacttccttaataaatggcattgcccagtacaacatatagttaagaatggatgggaattcgacattggacgccacttgatccccgtccgttcttttccttattttgattcctttccaattatcaccatgcgactaagatacatatgctctacggactccggagtataacataccttgtctctcggtgcttggcatagagccacccggtagaccgaaaaagtccgagtcggttgaacatgcggaaccaaacagcccatttctcggggattctgtcgaatcacattggactagattaatacaaaagccgacttactgttgatcttgtaattccgttattcctggtgtattgcactcggtgattccatttaccccaaacttgcaagactgccgaggtatccgcatatttgatccagtttccgcaacaattgacaactttattctctctccactctgttcaattgtccattctctgttttagctatgatgaaccgatctcttcttcgcgcagctgcgcgctcaatccaggctggtcctacctccgtggcaggccgccggtacgcctcctcggccgtcttcaattgggaggatcccctcgtcgcagcggacctgctcacagaggaggaattggcaattcaggagacagcacgccaatactgccaggataagcttgcaccccgcgttttgggtatgtttaattcgcttgcttctgtgaaatgatggactgacgtcagtgacctccttgcagaggcctaccgcaacgagaactacgaccgccgaatcctagaagagatgggcgacctcggcctcctcggagcttcaattgaaggatatggatgcgcgggtgtcagcaccgtggcatcgggcctcatcaccaaggaagttgagcgcgtggactctggataccgatcaggcatgtcagttcagagctcgctagccatgaccggtatctacgagttcggcacagaagagcaaaagcagcgcttcctgcctagcctcgctaagggcacaatcgccggctgcttcggtctgacagagcccaaccacggctccgaccctgggtccatggaaaccgtggcgcgggagcaccccacgcagaagggcgtgtacctgctcaccggcagcaagacatggatcacgaactcgcccatcgctgacatcgcgctcgtatgggctaagcttgagtctactgggaagatccgtggatttatcgtggagcgtaagcgtgcgacgcccgggtcgtacgagacccccgctatcaagaataagactgccctgcgtgcttccgtcactggtatgatccatatggataactgccccgtaccggcggagaatatgctgcccgatgtcgaaggtctcaagggtccctttacatgcttgaacagtgcccgtttgggaattgcctttggtgccatgggtgccctggaggattgtcttgcccgtgcgcgcgagtacagtctggagcgcaagcagttcaagggcaacccgcttgccaagtaccagcttattcagatgaagttggctaacgctgctacggatgctgcttacggaaccctggcggcgatccaggtggctcgtcttaaggatgctggcaaggctacgcctgagatgatctcgatgatcaagcgtcagaactgtgaccgtgctctggctaattccagaacgtaggtttctctgtcttttatttttgggttgctttactgacatagtattagtctgcaggaaatcttcggtggcaacgctgccagcgacgagtatcatatcggccgccatgtggccaacctgtttgtggtgcagacctacgaaggtcagagcgatatccatggtaagtcaaccctgcctgattgtgttgggctgaggctaatgcatgtttcaagctttgatcctgggccgtgccattacaggcaagcaggcctttgtctgaacataaaaagaacatatttgtatatagactatatcccaatcgaatgtttcaaagaggtacaccgcagttctaggagtagccagtaagacatcaggagctccccctgagaagtatagggtcacgctatcaaaggacagttccttcctctttgggacaagcgggaaattgcggacgcctcacccgcacgtgacatcatcgaggggcagtgtatcagtatcatgcggtgtaatacgggtttcaatacatacagaggtatattgaatgggagaggattggatatgaagtgtatgacatgactaaaattggacgtggccatgttagaaatgtgtatatgtgtctacccggttaggcactgctctctatgtatcaggctggtcacttgaaatatccacctgtctgctaatgctgtcttgtatacgggatactccatatatgccttttcctgaccccaaattcgatcagccctaggcattgcctttcatgaagcaatactcaatcataatatacacacatatacccttctatctacttctgcctcattctctaatacctcaatgaggtaacccagctgagtcatcatgtgtcaagtgggcgcccggtaattacggtattgggtcgtacaataccgacagaatcgattccgcccatgggggcacttttccccctcttcctcttgagactcccaattatcttcttccctcttctttttccacacaaaggcgtaatcgtaagatctgctttatctttcactctgagcatcaactgaccacccatcacccagcttcttttccactttcttcacctttctctctttgctcgtcatggctctcaagcgtattaacaaggaactcgctgacctcggccggtaagcctatcctgatgctatctctgctatcttcttgtggttcatgaatctaactctcctctagggatccaccctcgtcctgctccgctggtcccgttggagatgatctggtatgaactctgaaccctcgttttcttgctcggcgccatctggcggggcacaaccccggctttgacaatcttgatatcaatgagaagatcgtggatggctgacttgtcatttttctcttacagttccactggcaagcaaccatcatgggtcctgtaagttgttctcgtctgtgctttggaggaccttggggccatttggccctttgcgagctccggagattcatcaccagatccatgatactaatagatcatatagggtgactccccatactctggcggtgtcttcttccttgccatccacttccctaccgactaccccttcaagccccccaaggtcaacttcaccacccgcatctaccaccccaacatcaactcgaacggcagcatctgcctggacatcctgagagaccaatggagtcctgctctcaccatttctaaaggtgagcaagaccttctcctttcattctacacagtttctaacgacccatagtgttgctctccatttgttccatgctcacagaccccaacccggacgatcctctggtgcccgaaatcgcgcacgtctacaagaccgaccgaccccgttacgaggcgacggctcgcgagtggacgcggaagtacgctatttgagtgaaacgacaaatctgattactccttcgcttcttatgtcttctctatctatccctcaataaccctccttgcgacccctatttcgctcgaccactttttatcggtgtcatttcaacgtcgctctgcatctttccgctttcttgcccccgctctagattcagaatccgcgaaagcctggcgtacctgtggtcgtagaaacgttttcagttttcccaaactcagtgtgttaatttcaaatgcacctgttcttgcgcgcgtttgcttcctacttcggtgccgaaaactccatttgcgccgggtttgaccttgtttgttgggctgagtttctgggactttccatatccaacgatccttatgacaaattctcatgcattcatggcatccatttctctttttttcaaacgctccatgcgtctaggattgaattatggacactgccgagtttccgcaagttcttcttttgcttgtactagcgatgcttcagactcggtgggtaatgcttggggagtttcagagagtagttcgagatcgcccttgtcttgggtcttgcgcttaggggttataaggggctttatcttttcctatccaaatagcacaatctaggcagggcctatcttgtgtatgagcttttgatagtgtagactgtaatttgtacgtcgtataactacaacttcaaacactgattgattcacttgatgcattccaattgcccaactccaaatccaaactccctatatgtgtatgtatgtatatgtatctgtgtaaatgcaaataaaaaagaaatgaagagtagaaatccatcaaatcaactgtcgtaaaccatgcgactgaaccaaacccagactcaaaacaagtccaagcaagtccaggacgaaaagaaagaaagaagtaaaatgcaaaataaatcaaacctagccccctaaaaggaaaaaggaaccaggcagacctattcaaaacatgcatcatcaaaccgcctgacttccccgtcgactcccagcccgcgacccctccttcgcagtgcgctgactagcccgagaaacctgactcaccgaatccgccgggctgacacgatcatcagccctagagctcttcgagctcccagaccgatgcgagcggtggcgatgcggatgcaacccaacctggctaatcgagtcatccggcgagacttgcgaggcaacgtccagatccaccacgctctcaggaagcgggacgttccgcgcagagaaatgcgacttcccgccgtccctgctgtggatactcgggctggagtagaatgttgcgttcgagccggtggggagggggatgttgcgcgctgagcgcgaggatgaggcaacgctagcgttgtccttgccggcgtgcgagtgcgtgctgtgctggctcttgtgcgagcgtgacgtcgtgctctgcggcgctttgatcgttgaggagctgtgcacgctgcttggcgcgcgcatcttttcttcgtggtagctgctgatgaaggtggacggggcgcacgcgtagcgtttctgtgaggcgttgctggcgggtgggtactcgattgcccggagcgggatgtcttctgggatgctgtagatgctgccttctgaggcacggcgagggttttccatgtactcggagccgtcgtagattgtgctggcgcgagggttcttggaggttacgctgcgcgttagggttgagcgtgggtttgaggcggtggtgtaggcgctgcggggtggtgcaggtgcttcgatggcgcggaattgggattgttggtcgtcgttgccgaagaaggactgtgcggcggctttgagttgggggaagctgtttgcgaactgcattggttcgtgttcttgggccgttgactgtgagtcgcctttgaccattgcgtaggcgatcgctgctcctgcggcggcgccgatgagcgtgccgacgatggtcttggctgccatgctgccgtcgtcgctctggggcggtgcgtgcgactgcatggtatatgacggtggtggcgggccttggaattggcgcgagaccatagatggtgccgaccgctcatagactgagggtgctttggaacctgcgcgagacttggtgtctgatcgggcttcggatcttgcttcggatcgggcttcagatctcgcctcagatcttgccacggatctagtgtcggaccttgccacggatctttcggacatagcctcagaccttgggggtgcgatgctctccgccttggcagtgctagctctactgctcgcccttgagaccacagagcggctagaaccctccagcagagccattgtcggcccgctggcggcggatatcaccgaggcagcgccaggccggtagacggcttcaacgctgttgccatcgaagtcgatgacggctgcactgaagtacccagattgcgaatctcgcattttgggttcgccgtggatcttcgcgccggctttaagggcgcttatgaagaacgagccgacagcgtctttcgacggggctgggaaggcgacatggactgcgccaggaggacatctttggtttaagttagctttgtcgagagactgggtttctatatcactcacccaggcttagtctcggtcatccagaaatcagcaggttccccctgcttctgaccgaaccctatatagtcatcatgtcgaccgatgaattggtatcccaatggctgtaaacatgataaatagaaagaggtagaggtcgggaggtgagcgacagtcagggtgatatgcgagacaggcattgcgaaggttgaagtgagggtgcctggatactagcacgtagagtaaaagagaacagggatatgaaaaaaacgaaggtggctggaaggaaaagagaggttgaatggagtcggtaaagatatatacggtgaaggaatccaagtctatagccagaagtatgacgccgggaaacgaggccacatgaacagttcccccaagagccagtcagaataaatgccgtgtgactctaaaccaaaaacagagccgaaactaggctagcagcttccaaaatcctgcccaagctggcgaaaaggtctcacccagaacaccgcatgtctcccctcgatagtaggtgggcactgaggaacgtgtgaactctgtatggagtcaggccagtggggtccccgagacgattggccgaacgatcaagtcaatgctttggacccgatctgcacgggatatttgaaacggtccaggacgaggcgtgtccagggcccaagttgcattccgtgctccatacttggtgagcacagaaataataatgccagttcgtactcccagtagcacggtactcagaccggaaattgttcctgttcctgtgcttggccgctttcggatacctcggggcccaaccttgggaaagtgaaacgctctatggctggaagggtgcagatgggtccctgccaggtcatcgcggggagccaatgtggattcctgttggcggatggggcgtctgttcaggatgccctgagcgaggtgcatgagcctatcgacgttaagtggacattttgcttacttgttcctctcgtgtagcaaatggcggactttggagtggaggaagaggagatttgccaggtgggcttgggtagatgtgctgaccgctacggggttgagtcatatgttgtacagtagcagagcaactaactatggagtatgttgtacaccgtaagtcgatatttggggataattatgagaatatgatctagaatgctacgatctctacatctccaaatataaaatgggcagaagtgcatcgcctatcgccaccctcggtccgattcgcgtattcaaagtgaggcgaggctagttgcatgccacgtcaatcggaattattgggagaaagagaggtgaaagtaaaaagcaaagggaaaaagtaaagttaaaagtaaaaaataaaaaagccataattgtattgaacacagaagttgaagatatgtgtctcaggaatccccaaacgggccctgacctatgtgctgttcactttttctggtctacacatcgcagcgaggttgaagctggatggaggcaagacgaatcaaggactggcgaaaaggaaccaaatgccatccgacccgtaacggagggggaaaaaagacccaggtgctctctaaacacccgtacccttgggatgaaaatcccgatgcttggtagtcccagtatgttgtatgcagtatttccagttcccccaaacaaaacagagagatatagaaaggcagagagagctgggcttggagaacagccaaaatatggaacaagaacagatatatgcagagatatgatcggtagcttcgttccgggcagctcaatccccgcctgtaaaaaaaaggtgcctagcaaatgtgccgtcagtacagacgaccatgacgcgcgctcgttgggcgcgatcctttcttttctttttccagttgagtgtctcagagaatatcccagacctcttcggcagcgtggcagaacttgctgcaggccacactggcactaagactgtaattactgatactgatggtttcatccttaaaagagtccgcaaagtcgtcgtttcccttggccatggcaccgacgaagatggcgacactctcattggggttcagcgtctctagatagtccttggtgcggaccacgggcgcctcgaaactcatggtcaccttgcggcagttcgggggaagatggtcggtgatcgggttcttgataaccttgagaagcttttcttgcgagttggtcgaacggatggagagtcggtggagcagttgcaccatgagaccggcgaaccgcttgaatgttctcgggatacggacggaagggttgacttcgatcaagacgcccttggcggtgtggatgaaaatttggagccgaccggccttgttcacgggggagtcgagaagagtgagcagacactacgctggattagtggggattctttgaccttgctattgccactggcgatgttgaatcgtacctggtgggtaatatccggtcgggcttcactgatatcgcggttcattttgcgcatgataccgatgtgctcatcgctgttcaacagagagaacttctcatccttggttcctgaacgtccactggagacagccttgtaggtttccagactggcattggagaggaccacaatcaagcgttgggtgttcttgtcatggggaggaattggcatatgctgttcggcgacgagctggggaagctctggaggagggcatgattgggtccctggcgatgaaaagtcagacatggtgaagttgagaattgcaatttgggcgcggggaggggtaagggaaggggggggaaaggtgacagatgtggctgggatgtgatccgaggggatcaatgcccagcaatatgtcacacggaccaaatcagaatgaatccctggaagaattgatgttggattttgaagggttggagtcgtctgtagttgcggcgaaaaaaaatcaaacacagttgaagagattgccgcaaagcaaggggaaaaagacatagaatcaaaaggaatacatactcgcacgctttctctttccagcagcttgttcttggtccgacattgttggtctgaatgtatttgcaagatgtttgaagttgaagagtttttgggggagaaaactttcggggaaaaggcggccccaagaaagtcgagcgtcggaattatatagaaatctaatgcgtttctacgtaactacgcttctcttttattgtttgttagaatgtattcttcggactatttacagtctcaattgcaacataggagaatggcaggtaaaatataggagtccacgcgtatgtatatcaacatcggatattgtagttactcgtactcttcgatcaccttggaaattcccttttatgttagcttaacggcttagtgccagagatcgacattaactagcccctctacggggtccatgtctgtatacaattccaacagcgtttgaatcatccggaaagccacatcggcttctcttttgcaggttgataggtccaacatcccaataatagcaaagcgcctgacagggatgtaccaactcaactcacttgggagtaactccctctgtactagccctggtacactagcaaggttggtacctacagtacagagtcctctctggggcatgaatattgaatatcagaggattgagttcggatgatgaggatgtgtgacattcttgcataatactgcggtggtgactcagaatacactgatctgactggctcatgttctagcaatgcctcttgggggccgtacaccgagaggctgctacccagtggatgagcagggtcagcacagatgtgaggccatgaatggatcggaatggcaaaggtgatacaaggaagctttgtcactaggcagtgaatctgccgaacaaggagcagctcttctggtaatctttgaggcagttcagagtgcctgtgatgcctcgctcgtgatctggaccccgccggtagcgaccggatgaatgtgtatcatgtaggctccagcacaagctctttgcacgatgacatgccaagggctcagttgccaccaagtcggcactgtgagagtgaaatccggggggagcccatatgtgacctggtaaccttagccagctaacatcaagccaatcacttgagctcgggacttgacccaatcagcccggaagagtttgtgttgggttggcaacgccccagtattccctgtgatgaaaattaattgcagcctataaccggtcagctgtaggcgctggacatgaaaaaacagagcggtcaatgaggatcatcacaattccaacgtgggcttccttgcacgatgcaatacggggaggccttgcacgccttaatcagaggccaagggctcaggagagcgtcatctttaatctccctgactttggacttatcctagaccagagaagccccattggctggaattttcgattggagcctgtctgttgtgtgttcggagcactgtgaatcaatttaagtagaaagggggcgaaaaaaaagtgcccgacataccaaccacaggaattcgacaaggctggtgttgtgtgttatactccatttattgcatcttcacgtcttcacgtcttgaatttccccttcttcatcttcttctcttaaatctctcatcttccgcatttctccttggcccggtattaatcccggctggtggcgagactctcctttttttcacaaaacccagctctccaccaactattgatcgcttcatttctattttttttatctttttctccctgaacttgaaactgctctcaagcaaacctgaaatcctcacagtcagggatacaagtcctaagagctctggtaagccaacgctcgtcatccaaaaacaatatgtcctaaaacagactagcgtccacgcgtgccgtcaccgaggactttctcaacttcttcatcccaccgtcagcagcttggagcttgtcaggagcaaattctttggaaagtcagggtcatgccgtggatagttaccaattcatttaagaggtatgttggtgtggttctaatttacccaagggtagactaacatcccatttcagaggcctcatgaaaacttacggacgaccaacatggcgcgtctacgatgatgagcgcgccgcgaagaaaagacgcgtggatgactatgatgaagctgaggccaatctgcaatatgctatccgggaatcttcagctgccgtgctgtcgagcccgtcgcgtcgtaattccgtgttgtcggaagacacgcttgatgatattgacgatctcactacaccaccatcgtcgccaccaccaagcttaaccccaccaccagcaaacacccgcaagccggcatttgcctttctcaagcgcaagcacaaggaaactccgaccgcatcccccttgacagaggtgaactcgaatagcgtacgcgcatccgtggacccaccaaaacaaaagggtcagaaacaacctgtcatgcgccaaatgcagatcgacctgggaaatgatacacgaaagacctgtgctacctgttctatggaatacatcccatccaatacagaggacgcggcactgcataaaaaattccacgagatgaatgcgactgggatcgacctgggcaaggcatttatgcgtgccaacgcctcgcgttgggtttacgaagcgactcgatttgacgaggggtatgtggtcatcgtagaccgcaaggcgtcccctagcgccaagagccaagcgaagaaagtgctcgaggttgtcaataaagagctctcctcaccggatatcgatgacgagatcctctggagccaaacggaaccgcccaagcatttgcaaaagggctctcccgagaaagtagaccgttaccgagtcttcctgcacatgaaggacagtcgctgtgtcgggctctgcctaaccgagcgcatctgggaatgccgaccggtggtcaaggaacagaatggcgacgcacccaacggctctgtctcaacacgagaggaagtctgcccggccattgtcggagtctcgcgcatctggacttccggctcctcgcggcgcaagggaatcgctttagatctcctcgactgcgtggtcatcaactttatttacggaatggaaataacaaaggcacaaattgcattcagccagcctacggagagcggcaatcgcctggcacataagttcttcgagggtgaagagacatggcatgtctataacgagcagtgatggggttgacttgaatatgggaggtctttcttttctttaatttatctcacagcaatgagcgaggcatcgggctttgattgtgttctcgagcgtgtctttttatcttttatatgcttctgtaccatacctggacccttttcccgtgtaccatagggagctgggacgcattcgtttcaatattccaatttgactgaactattatctccgtacaagaacaatttgtacgtcttgtacttctttttatgcattttatttaagcctcgggcagccggactcgatctcggaaagcggcgcgtactgggaacctcatggataagaaactcggcggggacccctcaattcttctctttttctttttctctcgattctaacgtattcattctcgcgatgcctggatcaaatccttttcgtgttagaaacctgggtgagtattgttttcccctcctcttgagccttcccggtaacacggagtcataacgtggcgctgatgtcaatctggagacacaggcaatcccgcagctccattgtctaccaacccgggcaccttggcccctgtgccttctaagcctttgtccactccacctatagccccgaatggttatcccagaaagtcgtcgataccgctcgaacgcgaggtagctgactcgagctcctcggacgaagacacaaacccattcaacctgcgtgtgtcggcgagcgagagtgaggacaaaatcaatgcacataagagcccagctccccttgaggatgatcgacaacgagattattctgggtcagctccacatctagctccatcaacagatggatcccccatatcacccgaccacaacatgccgtctgcgacaggcgcagacagcttctatacaggacgtcatgcacggtcgtctatagagcttgatgcaagccccctcggccgagccagagacaagaagccgccacctccgcctaggagtcatcacggccgaagaatcggctctatagctaccgcagaatcatcccagaccgctcggtccaggtctactaaccgcctgtcaattcctggctcccctggaaatctgacgcttggcacctcgcatcccagctcggtgtctctgtcctcggccgactacttctcggtcactgtagcgacagggtccacggactcgctccagcgcagccagtcccagcataagcgtcctccgacgccacctctcagtcgacggcacagccagatgcggagatccaagtctacacagtccaaaattaccagcagattaaatatgtcttacgactcggagagcaatgatggctctctgcctcccagtccggacccttccagtcgggtggaaaacaagagactcagcatgcctccgccatcctcgggagacttccaggcgactgcgccgttgggaaatatctcactgaacctgtctccccccactaactccagaccatcatcactgaaggctggtcggcggacatcatcctatgggagtgtctctggaccacctccgcctcctccacctcggcgcactcgagactccattgcccgtagcagtgatgtgatggggttgaaggagaaccagtccccagccccagttccagtccctgttccagccccagccccacaaccatccaatgcccttgacatcctggctgatctcaccaaactgcagaaagaggtggatgatcttcgagggcattatgagaatcgttagtgatcgaagggggcagcaggctgttttctctcacgttttagtataggagattgcatacatgaatgaacgaatgcatgaatttggcgtagtgattaccagtattgaatttctggtaaacacctttatggggaaagatgggcgggacagatattaaccatatggtggctattagtgaccatcacgatagctccggtttgtataaaataggggcgaaatataactatctaatattcattttcgaccgagtaaactggataattcagtatctcgtcaagaacagagcccctctgagtggaatagccgatcaatagaccaggtaatctcctattaatatggtggcccgcagtattgtccccatggccgttaactcgcgcggtatacgccacgaggtatgacgtggggggaaattaattatttagttcgcaaagtccagggccaagtccaccctccttccctctttctctctcaacttctcttttgacaactctcgcattactgactctacttaatttctaaagaattaatccatcttcatatcttcgcatcatgaatactcccacgctgatcaatttgcctcctcccccatcggaccccgtcactccatcggatatgggaccgtaagagctctctataactccatcttccctgtctctatacgtagcatggagtgttgactgacttgctaatcaacggagaaaatcagaggcacccccaactccggcactacatcgctgtccgctctttcgacaacagccatcaaagatggtcaccagggccaaccattccctcacagccaccatgcgcaccagtcctccacatcctccacaaccctagaggctgaacgcgcagaccgcatctcccgtctagcgggccttgagcgcgttgccacagcccgcgccggtggccagacacccactagccagcttctgccatatgctccaggatacttcgagagtcaagcactgaaggagcgcagcacagtcggcagcgccagtgcgactggcagcatcgccgggcgcacaacctgggcgagcagtagcgacacatacgacgccgacaagatgagcgagcacgaggacgacggcacttccagtgtcagtaacgtcagtgatgaaggtaatgccagtctcgtcggttttggcgagggcgccaacagtacttacagcgggccgatttctcgtccgcctggaatgagccgtgtgtcctctggaggtattgcaggacgacctacttctatcggcagctcgaatatcaatcgcccgaactcgctggcttcatatcttcagcaacaacagcaacatgctggggagagctccatgagatcgtcgtcgccggctgggtcaatcactcccgagcctatcaatgaggatgctcgcatggtggatggtatgacttttgactcggatgtcgttgatactactgtcagaactccacgactagtttctacgcccggtcacagcagcagtggatttggctcgccagcccgggattagtgtctggttcatgctttggtagattcaagaagttacgaaggcgtttttctttagtggcttgatgcctcgaatggatagctttttttttttggtgtctgtttcgaattagcaatgactacgcatgtaattctgagagaaacctgtgtattgagactcttctcttccaattattcaacctgtcgttggtaactacctgggtcttcactctaaagaccattgccacctgtcttttgcacctaaatctagacacctagacactatccttgctatttaacatagaataatataccagcaagctaccatatagtctatcaagctccaagccaagcctaaagcccataatctatacaatcggtgtcccggcacaacgcgtatactgcagatgacggcatgccgcctgagccacatcgccaaacccgagttttcttcctttcacttctcaaccaccccaactacctttcttcgcccgaccccttttgctggcattgacttgtctagcagtcttctattccgccgacttgctggtttcacttgcccagaaaccccacgaattcccaatccgagaaatacccccgaaaagcccgtttcgcttcgcctttgttcgactcccgttatttcaccgggaccgttgttcgctgcgagactattttggtcctataagttcgctttgtgattcgtgtttcttctttgaagattccattttactttgtgttcccgaaaagcattcgatttctcttcttttggtggattcattctagacccgcgagtcgaaatcaagatggctgctcctacgcaacttgcttgtacgtgttttccttccatcttctatgtccctgacttcaggtcgcatttggctatgcgggtggatgaatggttgctgataaccacacagtccgcacgctcaagggcattagcatcatggatgccgcccctgtctaccagcccctttctgggttcgcgaagtaagcattgagccagataacaaacaagggatgtcgctgactcgtttcccagaccggagggtaacctccgctgtagcggctactcgccgtgtggtcggtacttcgcatgggcatcacccgagaagtaagttgacttgccccccaactccacgtccaaattctaacattcgtctccaacatagggtcaccattatcgatccctccgtgggccaagtcgttggaaccatccccgccgagaacgtgttcgagcttggattctcgccactcggcacctatgtgatcacctggcagcgcacatccaaggacgagaacggagatgccgtcaagaacttgaaggtgtggcgtgccattgaggatggggacgatcacacgattgtgggaagtttcgtccagaagtcgcagaccggttggaacttgcagtacactgccgatgagcggctgtgcgcccgtaccgtgaccaacgaggttcagttctaccagagcgacaacctgtccactgtttggaacaaattgcgcgtggagggagtcgcggattttgcgttatcgcctggtcagagtcagtccattgccgtgttcattcctgagcgcaagggccagcccgcccaggttaaggtgttcattgtcccgcagttcacttcgcccgtgtcgcagaagagtttcttcaagggcgataaagtccaactgaagtggaatgcttcgggaactactttgatcgtgcttgcgcagactgaggtggaccgcactggcaagagttactacggcgagacaaccctgtacttgctaagcgctagcggtgcattcgactcgcgcattgatcttggtatgtcttctcactatactacatgttgaactaactgacactccacagataaggagggtcctattcacgatgttagctggaaccccaactcgaaggaattcggtgttgtgtacggctacatgcccacgaagacgaccatcttcaactttcgcggtgtgcccaaacacaactttccccttgcgccgcgcaacaccatccagttctcgccgcatggccgcttcgtgctagttgccggtttcggtaacctggcaggacagatggacatctacgatatggacaagaactaccacaagatcaccaccgtcgaggcctccaacgccagcgtgtgcgcctggtcgcccgatggacagtatattctgaccgcgacgaccagcccccgtctgcgtgtcgacaacggcgtgcgcatctggcacgttaccggcggtctcgtctacaacgaggagatgaccgagctctacgacgtcagctggcgcccgcagagcatcgagcagcacccgctaggcgagccgctcaccaaggtgcctgcgccccacccctccgctctcgcgtatatgggcacgcgcaaggctcccgtcaagcccgcaggtgcctaccgtccccccggtgcccgtggccagctgaccccgctcgcattcaagcgtgaagacgaaggcggtgccgcctttgtccgcgatggcgttcccggcgccagcatgaacactttcggcaagccccgtcgccgtgagatccccggtgccgagccctcggaggagtatctgcctcccggagccgcacccggcggcggcgtcgccctgcctgccgagaacctgtccaagtcggccgcgaaaaacaagaagaagcgtgaggcggccaagaaggctaaggaagaaggaaccgaggttcccgcgaacgccccgactgcgcccagctcagaacgcagtcgtaaccgcggcaagaatggcactaccaatggaaacggtccggccaagtccacgcctactcctcctcccgctgctcctgctcctgctcccacccctgctccccctgctcccgtgtctgttgaggattcctctgctcaagataagaaggtccgtggcctactgaagaagattcgcgctattgatgagcttaaaatgcgtcttgcaggtggcgagaagctggaggacacgcagatgaagaagatccaaaccgaggatgcggtgaggaaagagctccaggccgttgggtatgatggttgattggaattgaacagagaatgcgtgatgcttgatgctcgacgcttgacgacgttatgcagattgcacccttgcatggatatacctatcgacccgcgtgtattgcatttggtataggagctgttcaggttgatatcgatatccgtatcaatatcaacaccactcactatcaatataaacttgaaatggctcatagaatatctgtaacagtagcctacaaatctaaatttacatctatctagaatatcacacatccaaaacagtcgatctgaatctagtcgaccagaaaagaagtagaaaagaggtgatatggcggcacaaaggctctcgattgtctgcgatgaacttccaggaaatttatatttcagaagaaagaattagaaatacacatagcattgaagacctgtctctcttcctaatgcgaataaaattatatctgattctctccctcaagatctccgacctgaacaccccaaacttgccacttagcttcttcaacaaagtccctccgcaaccacagcccagacggctgaccctgcgtcgaagaaagcagccctctactcgaaagatggtcgcgttcatcgccgggctgagtacgatccagccaatcaaatagcaaacgaagctgccagatccgatcacgaatttggtccggatcagcgccgcgaccgcgtgcagattgcacgatgttgcgcacggtgtgggacagagcgagtctcgcatctacagctgaggtacgcagccaaggtgggacggagacaagatcggtggtgatgcgcacggagcgcatcgggaaggaagatgggaggacgagggagcgctcgcgtatatcgaggtcttgtagggatgggaggtggaagacccagtcccagggggtttgggacggagttatcaatgtagatgccttaccggtgagtagggccatgcgggttggccatgctgagggtggcaggcccttggctgggtttgagaggggaccagccgttgctgggaggatgtcttgggcttcgctgagcccggtcagggtggaggcgaatacggaggttgaggagcttggactgtaggttgccttgcggcgaagatagatggatgggtcgccgcggaggaatttctcgcgcagggcatcattctggctgaaatctagaacgagcggccagtggtctggtccgcgaatctcgatacgggcgatgctgctaagatctggcagtagacagggagcgctgacggtgcgggttgtctcgtcgtgagaagtgatggtaatggggatcgaaattgggcggcgggaatcaagatcacgagggatgaggcatcgtggttcagcggcgagaacccaaagatggcggaaggcttggagatggcatttgttatcaaggacagtcgttgggaagatagggtagaatgcgcatataagcgcggtcacagcccggttggatgtgccaagtgtatagctacctcctccaaggaagagcactccgatagccatgtgtgccgccatgtgactgccatatggtgtatcagcgtcgattcgaccatggagcgagcgcaggcgccggaacagagctagatcacccgtgccggccatgactgccgcagcagatagggctaccaagtcttgacaattccgaaccgaattgcgggcgagtctagcatcgtagcttcgcacaggcagccgtgagatgcggataagctggtctagataaaacaacaaaagatctcgggcctgtgcttgtcccgatccagcatggcggagaccgaccgcaaagcagaggcctgcaataatgttgaagaatggcatatcttcgctgcgcagccggcgcacctcgctgagttgggatcgtccccggtagacttcgggcagactctggctgatccactcagcagtgggcttgatactatcccacatgatcaagtgtcgtgccagtgttcgtaacaggaagatatctggcctcacgtagtcgaagcgaacagtggtatcaggaatgtcaatcttcttcgctagtaccgagtcattcgtcttcatgaagataatcatgagagcaatggtcgcgccagccgtggcgcggtcgagtacatgagcgatttcgacggtcttggtacccacggctattgacaatagccgttcaacaatgtgcatatcgcgcatgccccgcaagtcatcgcctttgccaaggttaatgaaaccgagggcaaagcctgcggccagacgatatccttcgtcgcggagttcttctccggtagcagcagcttgctcgtcctgctcactgttctcgatttccgagagcatgacctcgctcatacgacgatgctgggagccacagtaaagtaaaccgatacccataattccagcagtctgagtcaacggtgacaggttcagctcagctgctccaaatggaagcattcttgtaacatgtaccgaaagcaagcgtgtgattagagtatccattgtgcccaagtatgacgcagagagaccgagcaggagaccaattgatgtcatggtatgctttggagtgaggtacttgaaagctacccacttagccaacgatttaagatggccattcagacccagagccaacaagaacccggcatgacggttggtaagatcctgtggcttgttgaacaatatccacgacgtatcaatacccttcgacgccttggagattgccagaccggttgagactccgttgtggaagaaggcccagcagaccttttcttccgagaacgcagatttatctgcgctgacagtcacattgtctggcttcatgacacactgcagggaaaatgaagggatgggcagtttctcagtcaacaaaggcaatcggccactaaaagtgagcattgcacgacccgctggagtagacaacgtccggactgtcacgagctgcacgatttctttctgcgcctctaacaagtccgaatcactccagccaggttcggctatgcactctgccaccggtgctttggactggtttagtagtttacctgcttccacaaatcgcttatcctctcggaatatcagcctggtgaccgagtatcggtcagcctctgcagaagcctcaaacgcattggtggcatcaatatccaatgctgagctgctgatataatggaaatcccggacggcattatgattgggctgctgcggcgctgccaatgaactgggttgggccgggttcatcgacatgtaaaggtcttctctgtcaatcatttctaggagcgtggcgttccaggacgtggaggcttcaatctggcattgcatgacggcttcatagagcggggcactgacgccttctgggaagctatcaatgacactctttgtgaagccccaacgctgcaaaagcttgattttttccaagggcgtcgatacactgtgaacctcggtgaagaatccattcaacgcacacgtccttggtgtgataccgaaacattcacgccacattcgccctttcctgggagttcgctcggctgcattcacaatatcaaggagagaaacaaatggtgtggggctccgatgagcagcagctcccatgagaaattcgaagatggacggaggcggaaagggttcggcgggaaccttcagcccagcgatatgtgtattatcctcaaactgccagcgctccatactggccatttcggtgccataatatgcatcctcggcccatgtccatgattcccatcctagccagctgcccagttgtgcgataacgggagcaagcaaacctagaggtctttgggattcctccgagtcgcaggtggagagcttctgttcttctcgcaatagatgcaaggctacaagaacactgcacaatgcggtacatcttgtgttttccgagaatgcttcagagatagggagatagccgtctcggccagcagccctgaggccttcgggactctggaggaattcgcggctgagggcgatgcaccggatcaagtacgaattctggcgatatgtagaccgacttgcattgacacccttgggtgcgtctcctgacgcgagactctcaattgcatcttgttcaacgatccatccccaggaaccgtccatcatccacggagctacgacgccggatgagccagactccaggtccagcatggactcccagctttccagatccaggtgtcctccactacttgatctaagtagaccctttttgcgacgcgttcgtttgggagtctgcgtttgtggaggggtgacgaatggggctgctagactcaacaagacgactgtcatggcggtccattcaatgttgtcttcctctttgcctcgaagccatttcatgacctcccaccatgcgaccgtgatgccatcgcccgctttctcagactcacgcaaggcaaacatgcagattttgagtattttcttcaccagttcattgcgaggctccattcgaatttggagtctgtggcgctttttatcagtgtctaccaggtcgactttcccgcgggagcacccatgatcaaacttgttgaagacgaggctgggatctgccatgactcggtggacgccactttctcttgggcgactctcgagtttgttggcagagatgccatccggttcatacagctgcagtggaataggaacctcaactttgacgggactaccccacagggtttgcaatgatagctcgcgttgtccactttctgtttcgcttagtgagagtattcgcgaaagatccccatcagagattctacaagcatccaaaacgtttgacacattttggatcctaaccgcacgcacgagtaatgaggtcttggactttttcttccggttcttgggggctggctgtcggtcggccctcagattcacaatagttaatttccgtgcctcctggtccacgatgtatacagctaggaaagttgtgttgcctttgtgggcgcttccaaactcggtggatgccaatgtagagatcttcaaccggcgagatgctggctctttttggaagctgcccgagaattgggacgagaaactttcaaccttggtcaatataagttcttccgggagtccggacgtcgattcacgtagggcaatgttatcaaacccggaagatagactgtcattgttaagctcttcgagtagcttgtccactggagtatccagaaagctgcctgcagtgctgtaaacagaccctgtgcctggaggtagagagcctcgaggattgaaaccaaagcttccacgcatgcttgctccgagagattgcctgaacccagcaccatgaggcatgttgctggactgactgccagtagccaggtccgaaaaagtgatacggtcctggctagttgcaaggtctgttcgggcgagcagtgagctgactcgcctcgatgttttgaggggaacaccgacatctccgaagtcttgggctactctcgaagccaagtcgtcttcggcatcatttctcccttcagataactgagtggaaggccagttgtcagttcgaggcccgaagctctctcggcctgctccagaacgagcggctggtgttgtcgcgccagtcgccatcccgaaatgtgagcttcgccttactgaccgggtacctcctgtttcccgtctggttttatctttcatcgagccgcctgattcatcatctttgtagtgcgcagtccagactgtataaatacctgtagttgtgttgatggtaacgactaggatcaaaggaccactatttggtctgttgatgcccgagagttcgtcttttggagagatatacacaatctcatccacagggtccagcacctctagtccagacggcctttttctggtgctagtgatgctgctctgaagccagcgggaagtttgcgacgtcacaactaagcccatctcggaatgaggattaatgagagagaaaactcggggtaggtcggtgcttgaggcggtatttggcacccaggaaggacctggagcagacgaggatttcgtcgatggacgcttgtttttgctgagagaaaatgactgagaggcaccgggatcaaatagcgaagacacgaaggaattaggcggcgcagtcggttgttgactgctactattttcattctggacctttctttggaaaataagaccccgaggcgtagcgaagacggagtcaacctcaaatgggaggggaattgtatgactattgcccgccacgaagaagatatgagcttgcgatttgagaactaccaccaacgctctagaaagagcctcgttagagtgctggggagctacaaccgccactcgtgcatctccatgtagatccaatgttgagaaggtttcagtccgcttttgtttctgcgtgccagtagttgcttcaggtcgacttggaggcgtgggtttggcgcgtttcgtgtcttcagcggcaaaacgagtgaatagagcatgtcgaatctcttctttctcggggtccattcgaaatactcgcttcaccatccctgcgcgggaccatacaacacagtgtttcgtccatactaactcatcgtccaccgggccagtcaatccgctttcgtccacgcatagcgtccagttgtaatggtcttctgaaggttcctgagggagaattccctctgcgactaagtaggagatggccgagggttcgtggacgcccaaagagcgaactgacgccatggtgggctggttaacagccgtagcgatcgtggtgcgccgtcacaaacagttctgcagtcaaactcgttgaaatcatttccatcgctcatataagtcatgcaagttcaattaacggtgcgctaagaacgcatgccaagtggttgaatggcgaagttggaagacgcgctggaacgcggattggatcaagttgtcttcgctttccccgaccaaaacaacttcctttttccatctacccaaccctccactctccctacctctaacatccttctctcaatctgcttttgcataggaacagacgttcagttatcagatcttactttgactacaagtcttcgactgtctatcatccctgcagtgcactgttgcgcctgtgctcgaagctacctgtagctcgacagcatcgccaactagcataatgccctcatttcccactacgcccttggtgcggcctagggaagatggcttgcagatcaggtatgagtgatgcgcttaggtcatgatacttgggttgacgctaatctcgttaatgcaaaatctttagctatccgctctcccatcgcattcacacagcaaaaggctacccacttcgagctccgaatggctcctcgatcatcatttacggttatgatactggattaaaaattgtctggagaggagggagacggtttgcagaaccaaagctgactcggcctcaagcgaagcccaagccagcaggaagtaatgcggattccgattcagtcatgattattgactccgatgacgaggaccctcaaccagtacaagaagagcctgtggttgaattcagtctagaggaaagcgaggttgaccctgctgctccgtacgaagagattctgcgacaaattgatattccccttggaagccaggtgctagaactggcggtgccccgtgttctccccgaggaagctcgctcgcctttagaccccttcccacctatactgagaaacacaattgttgtgtcggtagtttgttcagacctgtcaacaaaagttgtgactctaccacttgtgcctcctcaccctacgcagacggattcaaaaagctggcgtatccaaaccctttcgatcaatggggccaccactcatcaagatattccacgtggtgtatctatcacattcacctgtcatgaatttgaggatgagcaagaccagcgaaagtcgcggggccgatttggaaattttggtaaatgggatctgcttgtggccacgcattctgcagaggggtgcggcgtgctgttgctgcaccggattccgatccgcgaggaatcttctttgcgtctcgtggaagaggacattatctctcaacggcgcctcttgccggcacctgcacagacgattgccttcaacccatccacatggccatccgcccgccatgccaacctgcttgtcgcattctacagcggatgtgtgaagatttattcctgctttgttaaaaaggcctcgagatctttgcgacgggcttcgatgccagtagaagaatatgaaactatcgacacggaaggtcgctggttgatcagtttgtaccccggttttgagcaagggcccggcggacttccccggcggaagagaatcattgatgccgactgggtgctcggcggccgagcagttatggtgcttctcgaagacggcgaatggggcgtatgggatatcgaaggtgccggtcctggggctgtcaagggcccgctgcaacgtcagacgagtgtccaaggtgtgactggcggttccttgacagcatacgctgtctgcggtcgtattatgacaccactttccaacaccaactccgaaacagagcatcgaccccggttcgcgcctatgacaccatccacaaggcgtgtacgtgaagatggattgctgaagggatcgatgagcacagccagtccgtctcaccgtggccaaatctctgtcttgcagacaaatccatcctcggacgtattgcctgacgagtcgatcctgctccgtcacggccgccagagcgcggtcatcacgagcttactgtctctgtggcgcaacgctgtcaaaaccgccggcacttttgattcctcgaaccgatgccgcgtttctcctttccaggacgtgaatttgatgggccagaacttccaagcaattggacacatacctgcaccggcacgccgatcccggcaagcgctgcggcaagtctgggatgtactcgtggcagcagagcatcagattatgattctcgccccgaagttgacagaatccatcgaggaaagcctgcccgtagtgaaacaggaagaaacagaagagaccgaccagctgatgctccaacgaggcgaactggatgtggaaggaatgggccgcctactgaatggtatggccggcggaaacgcgtctatgcgtatgggcagccctgtaaagcggactcgcgtgttcgcctgatctcagtcatagtctactaatacccatactccaagtttcttgcttctgttatgctcacgttctactcattcataggatactattcgcgctgtaaggtggagcgcaaggcgagatccatgccttgaaattccttcctcggaagtgaataagctctgtatcggatgcgatatatcaatgaccattgcaaaaagtgctatgcacgagccctgacattgcaattgaatgttgcagtgcaacattccgttacaattctcgtatttggctttgggttcgcatcttcgtctctgttctactgcggatatcgatctgtctctcgacgaatcttacatcgatggccgcggggggcagaggaggggatggccaaagttggatgcgagtgaatatgggtatgatgggacatttcaattagaaagcgtagatgtgtacctgttacaactgaatattatcatggcttttttgtactatgcataagcatatatatcatgttagtttcctcaaccgaacaaaatataacaagatcatctatagagatcgatgttggttttccttcaacaatccacgatcaccaccccctcccttttgccacaaccatataccctcaaccgcccatgccgcagcactagcatgacgaccaacaccggatgcaagaggcaagttactaccctcggcatcttttgcattcttgctcttatctctaccctgggtctgaccagcagcgccatcggcctcggcaagcataccagcaacaatgccttccttttcaataacgaaccagagtccatcggacagctgcccaccccgctctccaaactctgctcgaccgagacggaataagatccggccaatgacctgccacgcgatgcatcgttgcgcggggaacgtcgagcgtgccagaattgccagctcggggatcgtgtagcccgcggcatgcggatcctcgccgtgatggtgcaggcccatggttgtcgggagggagagggatgtttcgggggcaaggatggttcctcttagtgagaagcggattgccgagggcgccattgagatggcgttgctggctgggtggtaggctgacgtggaatctgggtcttcttcgtcggcagagagaggctgcatccaggagagcgttgatggatcctgtgctatctcggggaagtagtgtgactggagatctgtcaggaaagacggtgaagatgggtctaggactggcatcggcgcttttggctgggggaagtggaaggtttcaagagtagcggggtcaagggaaggccgttcagaggccgggcggaggtcttgtgggaggtttggtggagcgagatcttcattacgggggtgcggcttaggtgatggtttgggtagagaatgttgtgcgcttggagcagaaacaggtgcagacgaaggagtgtcgaaggagactgatttttttggtttaggtttttcgtcggccacaggtgccggcggttcaaatccagtcttttcatcttcttcaatatttgctctgcggaggaatcgtgcaagaagtcctgggtccatctgttccatcagctcctctcgctcctgttgaatctgcgcgtctgacattgccgccagctgacggcggttctcctcatcgatggatttcttgtcatcttggacggtcggttgagtaggtacaggagtcggaggagtggactggtttgctcgtcgctgcttgaaggaagagggcttgcgcgggcgaggggcagggaatccagtcgatgacgacaaggtcggcaatttaggcgcggggggaatggcggtggggggagcccgttcttggatctccccgatcagagagaagggagagggaatttctggagcaccagattcaccatccaggtcgagaaggaagcgttcacctcggaaagccatgatgcgtaaatactggtgaagaggagaaaaaaaaggttatgtcagcgcggggagatccaagatgcggctcccaaagctaaaatggggctgcagaagaggctaaccggaatgggctagtggaagatggcggatgtgctagtcccaattggattcctcacattggtccgtggcatctacaatgttgtatacggcctgcgttgatttttctatgctatgaaagaccgatggaagactggttaggatcattcatctcgatggaaatagaaagaaggatgttggaggggtttttcctcagctaaacggttcttatgcacgtcgacgtcgatattgtcgtacctatcatgaacttccacagggaatacacaggcaggatcaatattacatagactctattgtctataagatggaagaaatagtcagtcgaaaccagatataatcccaaaatatagcgaacatctgatttgaatcacatgaggccattcggtaaatgaggccattccggtatcaggtactgcgcacaatttacggttctaagctcaacgatccgcaagggaataatggatatggtctccaatgctccgtgacttcaggaaacaagaattctacacaagatagagggtaagtatagcgccatgctccctctctatataccgttctatagcaatttccccatatctccgacgtactatagagctggacatatcaaattgctagtactttgccaaatgtaatgtgctgtttgatccataacctgcttgctctcgtcccctttcttccctttttccctctttttttcccgtcgtcttctccctttctatttctgctttcgctctctttttcctctcgacattttccccttccccccttccgctcctctcgcttttttttttctgcttttcccgcgcttcctggctgttttctctctgcctcaccatcttatctttctggtgttcctcttcccccccaaatctctgtttgccgacctgataccgacacgtttcaccactttgcgtcaactcaacgccttcatcccgattttgactaattccatcactttgtcaattttcggtctgttaattggcattggcattgtgctaaattatgtcggaccctgctaagatggggatacaaaaagaagaagggcccgttgacgatgtcaaatccggagcaggcgcccgacgtgcctccggtaccgccaggcggtcgcgtcgtaagaaggacgacgaccccgacaaggacaaggacaagaccaaaaaggacaaggaaccgaaggaaacaaaagagaaaccggtccgagctcctcgccggccacgggagaaatccaacaccactgcttcccggaaaaagcccaagctggaacccgcggaagaaagggctgctccagacgctcgcagccctccacatacccctgcaacgcctcaacctgcacagcccgctcagccaactcagccaactcagccaactcagccaactcagccaactcagccaactcagccaactcaaccaacgcaacctacgcaacctcaaatagctccaccgcctcaacctcctcaacctcctcaatctgctccgtcttcatactcaaatacaccatcccatacagccccaggagcttcgtatcagctgtcgcaaccctcccgcccacaatcgcaacctccagtaccgcaaccgccacctcaacgaaccagcgggcaaaacttcgaccccattcgctctgcgttcgacaatccatcgccagcgccatcatacagtccttctactcgcgcaatctctcctcgcaatgcttatcgtgccagtgcatcgccggcgatctcaagcattatcgacccaccagcccagaactctcaaccaatttacaacacccttcaacgctcctcttctggccatgtatccggcctctcttcgccagcactgtctgcgatggtttccacctctccacatccgtccttagcaccccccgtttcctccgctgcccgtggagccatgcacatcccgcaggccatgtcgcagtctaccccctacaccaccccatacccacctaccgagcagcggccaacgccatcacaacctcctaaacccgaaccgtctccgccggtgcaacctcagcctcccgcgcaacccgaacccgctgtgcagtcgactccgcccagacaacaaccaaccgattcaatggaaatcgatcccacagagcagcttgaacctagcgctaaaaaggaaaagagtacagctactgcaccgacatcaaaggcctcatctcccaagccagcgcgatctgccaaagatgctcctcaactgccccaaggatctggcatgatcacaaacgcgctgttcggcggaggagaggaacctgcaaagtcgcccgactcacgaagcgcacccagcatcatcgttcatgttccgctacaaaagggcaaccagattgtgaactttgcacggcttgcagaagagcaatatggcttcgctgccttgcaccctcgtctggccgctcacaaagcccgcatggctcgagtggcagctgctgcggccgcgttagaacgaaatgataagactgccaaagggatatctgccggcgagagtgccgatgaggatctgagcctcgatgcagaacgcgatagtgatatggatggcgatgttcccatgggtggcactggcacaggaaccaacggtgcgccctcggagactagcgatggaaagaagaagcgacgcaagaaggtcgaggaatatgaccgtgatgatccatttgtggatgacaccgaaatggtgtggcaggagcaggctgctgctagcaaggacgggttctttgtctacagtgggccactagtcccggagggagaaaaggtccaagtggaacggtatgtctactcattgtccccttactgcacatttactaattatctgcagcgccgatggtacaatcaaacgtggccgtggccgtgggcgaggaacaggtcggactcggaccgtgacctcgcacccacacgttcctattgcagctgccgtgcccgtctcccaagatactggcctgccattacgtggacctggctctcgaggtggcacctcacgccgaccgcggggcaataagagagccgatggtggcagcgaccgcgctgctaccgcagccttcgctgcatccgcttcccacgaaagccgtggtggccgtggtggcggcactgggagctctggtcgtggtggaactaacagcactcgaggtggaaagtcatccatatcaatcccgatgccagaccttgctcctgcgccgtcgggtgttgcccatggaccccctgctcccagttcgctatctagcccagagctcatgatgaaatagagaacatgttgactgatttttcgtggcgtttgtttggtggtcggagcttgatgactttgtttagttttatttgcgctatcattttgctcatgggtttgatttgcccacctattacattgttttttgttgtcggactcgagaaacgttgcttcgtgaacacatggactctctacgtacacctcggttatgttattatggctgaatatcttaattttcagccaagatgcttccaatggaacacgcttagactaagtcatccttaggcgcctcggatattgagtttgttttaccattgtcgattctttgtatgaaacaaaggtggtgtttcatgttttatggtatgaaacaatatgcaaagtctaaagtactctatgaaacaaacctagaccggtgtctatatagatatgcttccaaaagaaccgtattactagtagcaatattttatatcaaatggaattaccgacctgttctatatttatccatcctctaaagacatgagtgcaaaatctagaataagtggtttattggaaatatttatcgggcgcatatccatagaaagagtatgaaattgcacttatgtacaccgtgtaatgcaggaagacatcccagcagccaaagatagaatcggaaatgaacaaaatagggttcgttgccagatgtttctaagcagagtcattgaatgagaagtaagaagaagaaaatagaaaaagagagagaagagagacagagatacccatagatcaatggaagaaaaaagaaagtcctgttagggcagcttgactcgggctctctttttttttgttctatcaagagcgccgtgataacacaccagacagaacaacacagccgacaaggaaataacagatatccacgatcatcaaagccgaaatcgtatcacatcgacttttcaggtgtatgtgcacgttacctggacatagacatgacaatggaaggaaatagaaccaagacatccaaatacattaactagtcatcaccaaattaccgggccgtacttcctggttgggtgcgccagtttccgcctgatggaacaggcaatgggggaggcgggccgttcggaggcgcagtgcgaataggcattgccgtggagtgcaggttcgtacggggattggagttgttggagctggcggagcgagggctcatgaatgggcgagatggggcatcgatggcagagacaggctcgttgagctgctgacgcatcgcgcgacgaccgtatcggctgtcctcgtcgtttgcttccagcgagaggtgctccagagaggggggtggtggagaccgtgtggttcgggacgaagacgatgagtaatattgaggctgaggctgggactggggatagtgacggtagctggatgggaactcgttggcgatctttagagggatttcgcctgatgctgggtttgacgggaatggtgactgctgtggggttcgtgtttgcttgttgacgagagggggtttcccgatagtgcctgatatgggagctgcggcgggagacgattttggggttggcttcgaggcctctctagagagttgggttgatattggtggtcccaaataggacttgcgcttttcttggtccatcatgctcattgcccatccttcgaggttgactggtgtgcgcttcgcggcctgcaagaaggcatctttgtcctgaaaggagttagtacatgtgaaaacaagctacaggtcaaaaagagagatgaacatacataaagctctcgtggggttgggcgctcttcggatttcttcaagagacacttcccaacaaagtcatgtaggataggcgggaaggcatcgctcttgggcagcttgggcgctgtctcgtgcacgatttgctggagtagatccaaaattcccatgggccctgtactggcacggtttccggcaccagagtcggagtgatcgaaggggaactttccaacagccagctccatgaccgtcaagcccacgctccacacgtcggaacggaccgtataggcgcctccctgaattcgttcgggagccatatatgtggaagtgccaacgaatgtatcggcaatcgagttaactgtctcagtagcaacaccaaagtcacagagcttgatgttgccgcgggaattgagtaagatattggacggcttgatatcacgatgcatgatgcggtgggtttcgtataagtagacaaggccagccaagacggactcggtgatctttcccagcacatcgactcgaacagggccgaaatctttagaaacgcggtcgagagatctgatggcccgtcagctatatcctctttgtttctcatatcggtccacctacccgaggtccatatattccatgcatagcacaatatctctcgcttcgttttggaatgcaccatagaaagtgacaatattgggacaattgcagtcatgtccgactcgaagttctcgtagaatctgtttccgcacattctctttggcttccacacggataatctgcgggcataaggaagattagagctgaccaacaagcaagaacacaccatagacaatacacacctttcgagccatcactaccttggtagatgcgtgcatcaccttggagacagtacctccattcccggcgccgagttccttcaatgtgaccaggtcttcactgcgaagatcgaggcgaaactccagaccgatttcgagcgtatctgtgttgctaagttcgctattaccagcagacccagtctgtccatcgccatcggcaggtttaggggctgcattgagagcaagacctttgacattctttcgtttcaacgtccgagccttgaactggtccgtcatggcgcctggaggggttggagttgcacaaggggaaagttgtgaaagaaataaaacgaacagcccagcgcctgagtgatatcaagtccgggttacccaagccgatgggatcagagtggtcaaaacgaacccccgagctagcagcggggaagtcgatatcaccttgcgatgttcttggcgacgctgattggacctttcgggcgcgtcgcttcgaccaactatgaccaaaatgtgccggtcggcggcaaacagatattgggcttttcttacaggtatgaagggagaaactgggagatgatcttcaagaactatgaaagccactgcaatcaatgaaacaacaaatgtttcgggggttccaccggccttttgggctagcttgggtacttgtgactttacacaacggggtttacggctaaaatgaagtggataacactgttcaaactcgggcacgttcaatagtctcggccctacatcaatagtgtaaagcgatatgcataatgaggatccgaccagggcatggttgaatgtacacaaagacatcagcacgtgacacgaatggcttaagccacaatgaggctacctcaataggactagcgtctagccacaccagcactatccaatcaccgctacccgcgtcctctcctcgccgatggccgtgattcttcctcttgacaactattgcttcaattccacctctttgtctcacttttgaccgagctaacgagctgggcactacctggtgtcgcatctgcgccattctatcttgaatctttcatccgaaatcgcattcttttcggtccctagcaatagggatctccacttcaagatgagccttcgcgacctaatcgagggtgaggcagttatggatgacgacgatgaggaagttgccgacgactatgatgctgagggccgccagggcgcaggtgccgccaatcactacaatgactcgagcgaggaggaagacgaagaagaagatgacgaggaggctgctcgcgccgtcagttttcgcctttcaccgggttgtatctctttgctgacgaactattaggtccgtgaaggtttcattgttgatgaagacgaagaagacgagcgtgccgcccgcaaacaccggaaacgtccacgcgctgctcgcgaagaagagcaccttgatgaagaagatctggaactcattggacatggcccaagtcagcatcgtggaccagctactgatgtatgtaagccgcagctcattacttgacaagattctgatgctctgattttagtcaaagtttaagcgcctgaagcgaggcaaagatcgcgaaagctaccaacagtctcacggcgttgacgatattttcaactcggacgaagaggaggaagcgcaacaatatgctagaccaggccagcgtcgtggtctgcgcgatgaaatggacgactttattgaagaagataccttctctgacgatgaggctcagcgtgaacgggatgaccttggggttgcgcctgcctccagagtcaacaagaccggcttgattccgactgacacctcgggcttggatgaaaatgcacttgaggatatgcgcgctgcatttggtgatggcacagagtacgatttcgcactgcaaatggaagaccaagaggacgccgacaaacaaaccgaagaacgccacctagatttgaaggacgtctttgaaccatccgagctggctgaaagaatgttgacggaggacgataacgaaattcgtctcctcgatgaacccgaacgccatcaggttgctcgcaagccctataaacatgtgacattgaccgaggatcaattccgggaggaggcagtctggatttcgaacttgatgctactaaagaagcgcatggatcccgaactgcgcgaaccattccagcgctccgttgctaagatgttagaattcctgatcacggacgattgggaggtacccttcatttttcagcatcgcaaagactacatgattcatgctgtcaaagatatggccaatggcgccgatcccgacgacgagtccgccaaatacagcatccgggccgagaaactcctcaatatgacagatttatgggatatcttcgaccatgatctcaaattccgggctttgatcgacaagcgtggtacaattaaaaagacatacgacaatctgcaaagcctcttcaatgtgaatgattccaacgtcgaggatcaacttattgcggccacgagcatggaggagcttcaagatgtgcaggactatatccatttccagtactcctcacagctacgtgatctcaaccaggtcaatggcgatgctactggagaaacacaacgccgaaaagccaccggaagatctttctttgagcgtgttcggaacggcaaggcctatggcttcgtgcgtgcttttggtatcactgcagatgcgtttgctcagaacgcctccaaggaaggtcgccggcaatacaccgaagatcccaccgagcagcctgaagatttggcagatcagtttgtcgacaatgacttttctaacagttcgcatgtcctcaaagctgctaagtcaatgttcgccgaagagcttgctgtcagccctaaaatgcgcaaggtgatccgtcaggcatactacatgaatggagtcgtggattgcttccgcacagagaaaggacttcgccggatcgatgagcagcatccgtatgctgaattcaaatacctgcggaaccagcagctaagcgatattgcccgtcgcccggagatgttcttgcgcatgctcaaggccgaggaagaaggactcgttgatgtccgggtgaggtttgagaactttgaccagttccgcaaacgtctctacgccgatatcgagtcagacaactacagtgagcttgctgatgcttggaaccgtgttcgccgtgaggtgctggatttggctttgggcaaactggagaagttgatcaatcgcagtgtgaaggaaaatattcgacaggaatgtgagaaccatgtggccaaggagtgccgcgaagcgttctcacaacgtctcgaccaggccccttacaaacccaagggcatggttctgggcacagtgccccgtgttctcactctctccaccggatctggtcagctgggccgggaccccattcactgggcttacacagaagaagatggccgtgtcttggagaatggcaaattctttgatctttcggtaggagatgagagccgtgacattgcagatggtgagaacctagccgcatttttggatctgatggatcgtcgtcgaccagatgtcattggtgtttcaggcatgacgccagagacgcgccgcctgtacaagcttctatccgaaatagtcgaacaaaaagacatacgtggtgcatcctacacaaatgagcacgatgaggagatcagcgacccattagaggtggtcattgtcaatgatgaggttgcccggttgtaccacaacagccctcgcgccagaagcgacaatccaggctttggacctctaacccattactgtgtggctctaggccggtacttgcagagcccgctcaaggaatatgcatccttaggccgtgacgttgtctccatccagttcaaaccaggccagcaactagtctcccaggacctgcttctcaagcagctggaaaccgcactggtggacatggtcaacttagtcggcgttgacctcaacgaggcagtggcggacacggcgacagccaatctcttgccgtatgtctgcggtcttggtccccgaaaggcggctcacttgctcaagattgtcaatatgaacggcggagtcgttaacaaccgggtagaattgcttggtgtcaacgcaacatacccggctatgggtgtcaaggtttggaacaactgtgctagtttcgtctatattgacttcgagaatgctgatcccgatgctgatccgctggataacacccgtgtgcatcccgaagactacgatattgcgcgcaagatggccgccgacgcacttgagctggacgaggaagatatcaaggccgaaactgacgagaacggcactggtgccatcatgcggaagctgttccgggaagaggcacaggaccgtgtcaacgatcttattttggaggagtacgcagagcagcttgagaaaaacctcaaccagcgcaagcgtgccacactcgagacgatccgagccgagttacaacaaccctacgaggaattgcgcaagcactatgtcttcctcagcaccgatgatattttcacaatgctcactggcgagacgcccgactctttaacacctggtatggtggtgcccattgctatcaagcgggtatttgaggatcacattgaggccaaattggattgcggagttgatgtactcgtggccgagaccgaactcggcgttccctacgaaatccctgtacgcaatgtataccaagtccaccaaactgtcccggccaagattctgttcttgaaccgcaagggtttctcttgcaacgtctctctacgtgaggatcaggtcagccatccatctcgtcggaaccaggatcatggcttcggcgattgggacgaacagcaagagaaagccgacaaggagtcgctgcaagaaaagacgcagcgtggcggccaagccatgcgtgtcatcaagcacccgcttttccggccgttcaactctacccaggccgaggagttcctaggttctcaaagcccaggcgacgttgttattcgcccgtcctcccgaggtcccgatcacttagctgtcacctggaaggtggcgcaaggtgtgtaccagcacatcgatgttctcgagctggacaaagagaacgagttctctgtcggccgtgtcctcaaggtcggtggtcggtatacttatagtgacctggacgacctgatcgtcaatcacgtcaaagcgatggccaagaaggtgggcgagatggtattccacgagaaattccaagaaggcagcaaggccgagacaggtatgtttttgataatttatcccatctaactagcatccgactaacatctaatagatcaatggctcgatacttataccaaggccaaccctcgccgctcggcatatgcattctgcatcaaccccaaataccccggttacttttatctttgcttcaaggcaggcgagcatgcacgacttcaaaactggccggtcaaggtgattccccagggctacgaactgcagaagaacccctacccggacatgaacgctctatgcaacggctttaagctgatgtttagcaacatgagcaagggcaaccggagatgagtgtttctcgtctgtacagtgtactatctattcccaaaaaaatccccaaatcccgaaaagatgggatggaatttcctacttcttttaatttgatacacctttggcatcgggcatgtaaacaatatcaatgaatttcaagcgattcgtggacctcgagactgtatagaccggattacgtaggctgtatacaccgtgtaccatttgaactcatcctcggtttcaacattgtttcccactttcgcccctcatatttcctcgcatttcctcatatttctttgtttaattgaagcttcagccccgaatgcttcctgtgatgtcaattgtatagtgtggcttatcccccgcatcgccacgttcagccgcaccggaccgcgacggacacattgcggttcttgcaacccctcactgcgcaattatggcggccatggaagagctggagattcacagcaaggtagggctggaacagtgacagtcaaagactcaagctcaactaatatctttagtcgtactttgtacgttggattaatgtcagcgcgaactacaccatctcctggagtatccaaccgcacaagaagtccgtcaactttggcatcttcaaacaccccggcaaatcgtctgttctgagctcccatatccctgcctccgattcccaaagcaccgattcaaccgagaacctgcccgcaacggcgacgactgccggcgcgcgtcaacaaccatctgctgttatcgagaagctgacggggattgggctcaaaccaatcaaatggacgggcaagtgtgaggcagacaagattacccaggggacctacgatgtaccgttcagcgaagggggcaactatgccctcgttttcgataacaccttctccaaacaaatctccaagaccttgacactcgtcctcctcacctatccgaccggccttcaaccacctagctccgtatctcagccaggggcgtcgaccgagtcgctgccgcagcccaagacccgtcgacgaggcaacagtcgagccacgctcaactccctgcaagttgacgcatcgaaccaaaatgtctacactggactgctgcagaagcggcgacgaaagcgtcaccagggttgggcacgccggttcttttcgctggactttacctcgtgcacgttgtcatactatcatgatcgcaactctgccgcactgcgaggcgcgatcccactctcgctagcggccgttgcgaccaacgaaaagtcccgtgagatatctattgattccggtaccgagatatggcatctgcgtgccaataacgatcatgaatttggtgaatggaagagtgccctcgagaaagcttcctccaaggaagcttctaaggacaagaacaatggcagtctagctgcccctccggagctgcggcttttcgccccatcgcagccctcaccgatggaggagagtgaatgggctcgcgttgagagccttgtcagttatatttccggatcgcgagatgcgatccgccggctagccaaggatacagatcccaagtatcttacctcgcccctctcaactcctatcgaccggcctcgttcgcgtggccggtcccctagtccccagcgcagtactcatgaggctacccccagtgagatggaggccaggcgcccgttctggaagcgcaagacaagtggacaattgaatgccaacagcaagcgaccatcggccatgtccacggactccagttcctctcagcttgtggtgcctgctaccgagggcaagggaaagcctgccagtatcaccagtcccatagacagcatggatgagattcatgaccatttgatgactgtgctgcgcgatcttgacaatgcggtcactgagttctccacgctgattaccgagagcaaagagcggcggcacccgccccagccatctatggttcctcnnnnnnnnnnnnnnnnnnnnnnnnnnnnnnnnnnnnnnnnnnnnnnnnnnnnnnnnnnnnnnnnnnnnnnnnnnnnnnnnnnnnnnnnnnnnnnnnnnnnnnnnnnnnnnnnnnnnnnnnnnnnnnnnnnnnnnnnnnnnnnnnnnnnnnnnnnnnnnnnnnnnnnnnnnnnnnnnnnnnnnnnnnnnnnnnnnnnnnnnnnnnnnnnnnnnnnnnnnnnnnnnngacgcccgcctcagccatctatggttcctcgccggagtatggagtctgacatgtcgcaagaattctttgatgcgacagctggaggtggtgacaggtctcccctcctgactatccaggacagcgacgacgaagggcctgaagaggaccggcctgcctctgctgccgaggcagtccaggatgatgccccctctgatagtgacggtgaatgccacgcggcagcaactcgccaggaaagcagcaccgcatcgggcatgttcccagtcaaacccaaatcgttggttccgttgcccctggagcctataaaacgccgggcgaacattctcgccccaacagtcctacctccaagcttgattggcttcctgcgcaagaacgtcggaaaggacctgtccacaatatcgatgccagtgtccgcaaacgagcccatatctcttctgcaacgcgccgccgaggtcatggagtactcaaatctgcttgaccaggccaccaaatccacagaccccattgagcgtctgatgtacataaccgccttcgcaatatcctccctttccagcagccgcgtccgcgagcgttccatccgaaaaccattcaacccaatgctaggcgagacctacgagctagtccgtgaagatcaaggcttccgtttcatctcagaaaaagtctcacatcggcccgtccaactagcctaccaagccgatagcaaagaatggagcatttcgcagtccccgatgcctagccagaaattctggggcaaatccgccgagatcacaaccgaaggccgcgttcgcattatcttacacagcaccggcgaccgctatagctggacgccggcaacatccttcctacgcaacatcatcgcaggcgagaaatacgtcgagcccgtcggcgagctagccgtcacatgcgaatccaccggccaccgctccatctcaacattcaaagctggcggcatgttctctggccgcagcgaggaagtctccacccgcgccgtcgacgcaaacaacaaacccgtatccctcggcttatctggctcctggccctccacgctaactctgactcgtgacggtaacccgaccgatgacattatctggaccgccggctcgctcgtcccctctgcgccaaaacactacggtctcacctcctttgcagctgcgctgaatgaaattacctcgattgaagataagcatttgcccgtcacggactcccgtctgcgtcctgatcagcgcgcgctggagaacggtgacctcgaccatgccgaggagcttaaggtacagcttgaggagggacagcgtgcgcgcaggcgcgatatggaggatgctggggagagttgggttccgcgctggtttacgcggattactgatgacactgacggggaggttgcttggcggctcaagagtgggaaagatgggtattgggaggagagggctaaggggagctggtctaatgttgtgcctgtgttcgagaatcaagagggttagactagatagttgttgatgttggtttgttctgttggttacattctattggacatgcaagaccaagaatataaaggagagatgaggcttcgcggtgttttgggcaggaccttcttcactctatatcacgataaatacggacttttctttctctggatgtatcattctcttgaacggcttactgagcgtgaggatacttgatgcgcagtgtcatttcgttgggtacaaagttaagagtatcgaatcacgaacaagaagtcaagtaaatatgaacagaaaacagaaagcaaaacatcaatgaagagaacattgaagctgagaataaatctcatgaaccgaggcttgtatgcgaaactgaaatcctccatgtgaaaaaccgtaagctgtcgtattcatcgataattgaaaaaccgaaaaacataactcctttttattcatggttccattgttagaccatcaccgatgcgagtatgcaaggtactcatttactcgtcgtcatcggattggggagcagtccagcgacgcgagttgcgcatcttggctgccttgcgtgcactttggcgatccaccgacccataattctgatttgccatgcgcatcatgacgggaaggctgttgagaacggaacggttaccctggaaatagtgttcggaaaagccgccctgcaggatgcggcgcagagcagtgagtcgtacccacttccaccagcggtcgatagtcatgactccatggcggccgatcttgacagtgagagtgctgccgtaatgacggttggtgttctggtcgatggcggtgttgtaacgaggaccgcggcctgggttctcgacagtggtgaggatcgaggcgaagttgctgtggagggacttcttgtcgcgcttgcttatctgcttgccgtggacggtggccaggttctgaagttggctctccagctcgggagtgttgtggtaagcgttgtatcttttcacgagcttgggaccggatgtggaatcgtgctcatgctcgtcgctgtcatcgtttgaatcagcgctctcctcgtcttcgtcatcctcttggggactgtagctcttctcatagagtagggcaatgttttcgcctgctgcaatttgcacgttggaatcggagctgtcgagctgatccatgaagatctggactgcttcctcgctttcttcttcaaaatcgtcgacttcggtggcgaggaatccccactgctggagcgcggcagtaacaatggtggggtcgtctgtggcatcgacggattggccatccgaggcgatgatgtccaggaggaaactcatctgttcaagaatgccatcttcaccggcacctccgaagatagtacacgccccaaggcagtgaatagctgctgccttgacaagaggggaagcagagtcacgaacggtacgggtgagcaaggactcggtgttttcgtaaacggtggtgtcgaaagctgagatgacaagcaactcgatagcgcgcaagccaagggttgcttcgcgcacactaatctcggtgcggacgcttcgctcaaatgcggccagtagttctggaacaacgccgtggatttcttctactgtgtagtggtatttggtcaggcggcagaatacttgcagggcctcctcgcggccttggacactgctgcgcttgcgatcaaggatttcttgaatacgctcgccgagttcgtgttcccaatcgggattatcttgttcggggttctcatcgtcgagagatccgatgctatcccgaattggttagtgccttgattgtaaaacttgccgacatcattggtgacatcatcccgccacgagagtgggaccatatgaagatacaaaaaaaaaaaaacagacgaaaagcgcaagaggaatactatcagcttacctcatagatgtttcgtcagagaggaatcccgagtcttcttcatctgaaggagctctgctggcattacgagagccctggcgcgaggtctgctttgaactggcgggggagttggtgcgggatgcttcacgggatgctgcctttcgtgagacagtcttgccgctctcgaagatctggcgacgtagatcgggcattttgataggatgataggggaaatcctcgaaatgggtacagttgggaacccagtgtgggaataagtagtaaaaaggatcaagccaagagacggttctctttttaacctatgggtactggacaatagtcgagaattagaagagaaagaagtaagtaattgtgcatgttctcaaagaattcgagtatactgaaagaagaggaagaggagagaagaagagaaaagaacaataataacaataggacgacctcgggactcgtgactgcgtatgtaagcctatcagatggcttcttttacattttgtctggcattccaccaatcagatatagattgggacaatattcctcttcctttgaaactattcatcgtcattgttcaatgtgctactagtccacttacggcagagtttttcatttccaaggttagggaaccatgacagcattggtatcagtatggaggattggacatggactttgacattacgccagctgagtattccctttgatctttctttgaggggtatcattatcatacatccgagaagttggagcctgttacagctgctgccgcaccaactcgaggatctgttgggccttggcgccctcgagatactcgcgaccttcctgtcgccattcatcttcctcgtcttcctcgtccccaatctccaagtccacctgcagactagcattgtaggcacctttgaccgtatcttcgtccacacgcactccgttttgcaccagaactcgaatacactgtgtcaaccgtgcaatctcccgacgggtctgtggcgggatatcgtcattctggctagagtagatggagctcgacaccatttcttccatgcgcgtaatagagacattttcagtagtcgatgatgcggcatcttcatcggaattcttggagataaatatgtacccattcaccccaaggacaatgttcacgttaccaccaccattggcagtggattccgtccacacctgtcgacgagaccgcaccacaccaccagtaccagaacctccaggagcagccaaagcgctgcctgaagccgaattcccaaccccaacgccgcccttgacgctagagctagacgctgcgctgcctccggttcctgtaacggcgaggaaaacaccgttgcgcagcttcccgtacttcaaagaccgtgtgtgtagtgacgccgacccatcctggtgcacgctctgcacttcggcaactacaagatcgccttcgctgaaaaatgttcggatctggagctcgtcggcgcttgttcgtcgacgcagaataccgccgggcagattgattgcggaaagagggagctgggcaagtagcggtgccgcgacgtcgaccttccaccgtcgtgattgcacttcgacaatgcggccaacgacgagatctccaatttcgggggtatagcgggcgcgcagagggtgaacagatagtagcttatttgtcttttgaactgtgccggcaacagtggcaattatagaggtcgagagcgggttcatataggtaccatgacctctgtagattgttagtgctgaaaaaaagaaaatgacgatatgagctccgcattttttttttttttgcgcagcattcaagatcagaccaacctcatccattgtggatcatctgtgaccacttctcctggtgtgacaatccctgtgccaatattcgaatttccttgtaaacggggtcgcttgtgaggccgagagataccagtcatttcgacatcctcctcggagtccatggacatggagtcatctgagtcagcttcgtagggacgggagtcctctaccacaggtgggagaatagtaattgccattgcacagtatgttgtctgtgatcgattgcggttgacttcaaaatgggagtggaggcattcagataggtagagaagaaaatccaggtcacgtgatagccccacactatagccaccaccatttacaagagaaaatactccgtacattagttagattagagctatctcaataccgcatgaagactacatttcatgtcactatatttcaaattaccaatgctaatgttccatcatatcatttaaagccagtgaatcaacccaacgccaatattaatacataaaatgaattccgtttatgaaatcaactgctcaagtctttttggccactttgcttgggttggaagtgggctcttccttcttcttttttgaccggctgctaccacccttgggtctataaccggtgtcctcctcacgcttgcgcttgttcttgggagtaggctgggcctctgtgccgtcctcatcatacatatcctcatctttgcgctgagctggagcccgcttggaagatcgattggaagggcgtgatgcagacttttcagaagcaacctcattatcctggagagtctgaggttggttacgacggagccaattgtataccgatgcgggattccgcatggaaagatcacgctcacgttccgcaaacgtgggacgttctggaatgcgtgcaagctgcgtggcagccgcctcatcacctagcttggcgtccaaggcaaggtagtactcagtctcacgctcgggcgtaaagtatccaagttggcgttcacaatcattgtcgggcttcttttgaacagcgtctggagtgatgtgatgagcccgtgacagggagctatactgctgggctggtgcaaacgctttatttcgtttgatgttgtcctcaatgatacgataagcacgcgtgtcaatgctaccagcagccagtccagctttggcctccttccatgcttgttttgccagtgtcgcatcgttgatcaaaggtacaatttcctgctcgggggttggtagcaagggaaggtcggtcggcatgctcagatcgaatcgcacatcaggagaaacatgtaggctttcgttgaactcgaggagaacctctagcaattgactagcacggaggaattagcaatagttcatacaggagagaatttgtaagtcccatactcgttttgctcttggatgcgcttggacaggtcctctatgcgcaattcctcccggatcaaactctcattctctcgggttcctagctcgaacctgactttcagcttggcatatttcttcctggagaaaagagggtcagcattatccgatgggctgattgtgaggactcgtacttgaaagaccggactgattgcttaggaggcggtgcagtggctgcatttggcaaagttgcagtgaagcggttatcgttcggttctgccatggtgttatggggaagagaagtttagaagagccgggatgaaggggatgtggtcaccctgcgcgttcacgccaagaagcggatccggctgcgtgagaggcggggcctggccgccggcaaaaaaaaaaaaaaaannnnnnnnnnnnnnnnnnnnnnnnnnnnnnnnnnnnnnnnnnnnnnnnnnnnnnnnnnnnnnnnnnnnnnnnnnnnnnnnnnnnnnnnnnnnnnnnnnnnnnnnnnnnnnnnnnnnnnnnnnnnnnnnnnnnnnnnnnnnnnnnnnaaaaaaaaaaaagtaaaattattgttcggtttcctgtgaccagaaacaatctcaggcttctgatagattgactaatattatagtagtcatcacaccattttacacctttcacattatgtcggaactcaccgaagtcagtcaaaagaagcgcaagctgcaggacggtcctgagcttgaaatcgatgtctctgcacccgagccagtctcaaaaaaggcgctgcgcaaagcgaaaaagaacaaaggaggcgatgcgggtgatgaggagaaacccaagtccagcaaatctagcaaacccgagtctaaagaagctgaatcagacgggaagcggtccaaatatggtatctggattggaaacctatcgttttcagtgaccagtgaagagctgcgcatgttcttcaccgtcaacgctgatatctccgagtcaaatatcacccgaattcatctgcctaagggccccgaaagatttgggaggtcgcagaacaagggctttgcttatgttgacttcaccgacaagaagtctttgcaagaagcaattggcctaagcgaacagctcatgaccggccgccgcgtgcttatcaaagatgcaaacaattatgaaggtcgcccagacaaatccgaagcccaggcgaatgccgcgggtgcagccaagtctggccaccctccctccaagcgaatctttgtcggcaatctcagcttcgatgtgaccaaggaaaacctcgaggaaaacttcgccaaatgtgggactgttaacaacgtgcatatggcgactttccaagacacaggaaaatgcaaaggttatgcgtgggtggagtttgaagaactcgctgccgcagaagccgcggtgaggggattcatgttgatcaagcaggatgacgaggaagaggattcctctgacagtgattctgactcggcctctgagaagaagaagtcgaagaagctaaaaccccgcgtgcaacgggtttgggtgaaccagctcatgggtcgccgtatgcgaatggagtttgccgaagatgcgggtacacgatacaagaagcgcttcggaaaggatgccgagaagaaggatgaacctgctatcaccgaagtcgatggcgaatcacgagaaagaccccgacacaagaagagacgtgaatccatcgatgagtctcgctactcgaaggaaaccgtccagaagctcagtggtgccattgtcgagggccaaggtcagaaaatcacgtttgactaagttattcatctgcttcgtggagtccaattatctgcggtctttctacaggaccattcaatcatctcatacacaaatgtcagtggaattctgatacctatcaatgatctgcccgcaatcgaggtggcattgggatcaaactccgaccgtggtctaccctgtgacttaagcgggatcctttggtcatagtttttgaatatttgtacgatctctccagatatccatggtcatcgagtccattcctcagtggcacagcttgcagtgaaatgcgcaagaaaatgtacgtatacttccggatatcacaacatccggcctgcatactagggcgcaacctcaaatttcccagaatacaagcaaagtttctcacataacaatattctatatcaaagccttctgtaactagttgtcaatatttagttcagacactaaccaaatcaagtaaacaattctaggcccaatcgtggcagaaacagcttcaccgcctggactaggcccgatcaggcctgacgtctctcgcgatgtcatgcccttcctctgaactcgaatctctctggacttctcatctctcttgggctgcatctcctttctcctttccccttgctctttctcttcttgctctttactttggttattcttcttgcacacggtttctttttgtttcttctagcctttcttagtactttggtcttgcttgatttcatttgctattccaccgatttatcgtccttcaacgtccgttgtctaccccggattccgtcctctaacctaatccggtcccggtaaccacccagtcaagcgtcaacggggaagacttaagccacccccaagtgattaatcccttgtgtctctaccatggctcctcttcgacgtcatatcggggccagccgcagaaagagacgggaggaagatggtgaagaagagagttcaatggctggtgacatgggagatgactcgttgagtgaaggctcgtgcgatagccaccaggaggacgaagatgcagacggagaagtcagtgaagagagcgaggacgaggtttcgttggataaggcgggcaaggtcaacggttgtggggtagacaaagctacacggaacagctctgcatcccccggaaaacgagtactcaagacaacagtttcggatacagaggcaatgctcaacggcctgaaggtctcagacggtgcgggcgacgctacggacgttcatttcgaagatctgaaggaacaaagggagcctcacgctggaagaacgccttccgcccctccaaccgaatcaagtcgaaacaatttagcttccagaaagcgccgcgagaatgacaagaatgtcaaggaacgagagcagaacccagccttcgtccccactcgcggcagctttttccttcatgacaagcgatccaccgacaacggtcaccgactcaagagcaagtctcgtccctacggcttgatcgtagatggtagctctcgcaggtatgttatattccattctatttccgactcctgtttcttactaacatgattcaggtcttctaagcccgatgccagtgggcagtgggcacacgatctccacgataccgtggctggcgaggatcgacccgcagcaaagcgcccaacaccatccgcgatgcctaatcctggcgcatccgtccccaccgccccgagatcttccccgcccaaccggtccttctctagcacaacgttggttgggaacgtacctgttgttgtttccttgcctggcatggccagcccaattcatttttcttccgtgcccaaaagactccacacccggctacctcagcatcgaccccctttgcgacgcgacaagccagtgcgaatctctcttcccagccagcctccccgatacatatttccctctgttgaacgttcgtttatcttcatcccccgcgcgttgcggccgaaccaagtctctcgtggtcgaggtcgtggtggcggctggtacggtggacgacgccctagctactatcccaactcatcttacacgccgagcattatcagccgtcgatcttcgtttggtatgccaccatctcaggatgggtggccctcacctgctgtgtctgtctactccagacctataatttccaacgactctaagcccgttgttcgtcttccccctccatctcgtccgcctgtcgggatcccaccatttgggcctgcgatggccatgtcccttcctcacccggcctatcgcgaaagccgccccgccccaatcccgatgcaccaacctcgtccccagaagaccgtttctgttgcggacattgaaagtccggcagctttcccgttcactttcaacccgcctcagccccagcatgagcagcctttccaccatcaagtccctctcccagctcatggcccacccagccagccttcggccactccactttcccagatcccggagcgggcgattcatgcaccgccctttcaaccttacaattaccaccagcctagcttctaccctccgagttatccttcgggcggcatgtactacccgccttcggggcccgattacacgggttacaatggacctattggccccggagcttctgtgccaaacttcccgggccagcaagtgatgccgtatttagctggggagcagcctcctccaccaggtactgttgctcatgagtctggtggcaccgtctacttttacgatgccaatcatatttatggaggtcccgcaccaccaggatctgggcctgggggggtggttggcatgggtggaatgatgacaccgccaggcacgaccttctactaccctcaacaatccggtcaatattatgggcagtgatgaatgactttggcttttttttttccttttcttctctctcttattttatttttttcggatctcacaacatcttcaatttccaccaattctctctttgttctcaattctctctcccttttctttcaactctctctccaggatctacaggggccttgggctcactttgctttttctttcttatctgcatcctcacattctctagccaagttttgcccttttttcctcccctaatttttgtcctagtgtttgactcatttcggtcctggattttgatgcatttgagcgttttcccttgtctccaccactttccccctattgtacttggccttggagagaatcacgtcttgattctagcccttgtcagcccttccaaaaccccctcaatcccctcaactctcctccaatcgggcgatcgaattgccgttctgcattcacccatgcatgacatcatattttcgctggtttctatttgatgatcttgtatactccctttatagggtgttttgatgaagacgaaataaaacaaagccactactgccagtaattcgatccgtccacctgggcactaccacatatgtactccgtagactacgtagttctgacaagtcttggcattctcggcccggcgataaacacgtcacattcttatgtaatccatactgaaagcaagccaatccctcaccgcctgccctgtcagttcgcagcagctgaccgtctctccgcttttccccttcaattcgactgcttcttgtacaactcccctcttattttccttaactctcctctgcttcttctactttctccctcttcatcataacagatcatcattttatcttctggtattcctttcttactcgtaactcagtacaatcttccccctttcctttccatcatagtactgctgccttatctcagaggtgtatccaccctttgacattggcatcatctacgatgacaactccatctactacttctcatttcagtccagagaatctggttactgtcaaagtcctctacaatgacagtaaccgtcgcttcaagatgcctctcagggagctgaaggccgagatgttcccccagactgtaagtctccactcaagctccggatctgaagtccgacttatcttcaacgatcatcagattatatttgtatcgaaataatttgttccaaccctcatcagaaatagcgtgttgttttcaactgacttaatttttcgtctagcttaggaaactgctcggcgttccggcggatgtcaacgtcatccttgaacgctattccgacagtgctggctcttacgttcgcttggactgtgacaacatcgcagtctataaacagctctaccgggctgccaaggcaaagtctaagctccgtattaaggttactactcttccttccaaaaacacatccgccccaaccccagtaccatcagaacccactgtgccgatggagtcaaccaaccacactcgtcacagttatctcgaaacagtcctgagacctctaccacctcccgatacccttcctctcattgactcagcccaattcccttgttccaccggtgagaaagagtttcctctcggtcaacctcgctaccgcaacttcgagatggaccaagaaaaacatcagttcccggtcatctcccacgcctcgtccaacgggatgttctgcattgactgcaatcactgtggccggtctattgcaaatgcgcattatcactgcagcatttgtgagaacggggactatgacttgtgtctacagtgtgtcggtgccggcgcatcttgccgcggtgaaggtcactggttgatcaagaggaccgtcaaggatggtgtcgtcacaaacagtaccaccgagactattcctccccgtgatcaatcaggactggagttcaaccccatgctgcctcggcagattcagcgtgaagtgatcactaagccggtggtccacatccctgagtcggtcactgagtcagtccctgagttgatccaagagtcgatcccagagccagcggccccgtcagcttgtttggatgcagccaccattcaaggtgatgacaagccaatgtgtaatggatgctgtcgtggtaagtcttctgtttctcgcctccctttctcttttctctttgctcacaacacacagaagtcgacgaaatcaatctcgtccgttgcaatgactgcgaggactatgatctttgccttcgctgcctgctccgaaataagcacgggcaccaccctggccataccttccacctcggatctgaccggaacttttgcttgaagaatttgatcacgtctcgctgccttcccggtcggcagttccgacactccgctgtctgtgacggctgtgacaaggtatttactcacacattccacttgcttaggaggttcgcggctaattttagctagcgcatcgttggtgttcgtcacaagtgcttggcctgccccgattgggacttctgtcccgattgcatcttgacttcttcgcagagccaccctggccatcggtttgtgcaagtttacgagactatcggtgagccagctcgtgagcacgaaattcactatggcatcttctgtgatggtccactgtgcaagagcaaacctgctcagagctacatcaacggagttcgctacaagtgcgctgtctgtgatgacaccgacttctgtgcgagctgcgaggccctcccgaccaaccaccataaccgcactcatccgctggtcaagttcaacaccccggtccgcaatgtgactgtgagcaccatgggcgacgacggctcaagtggagcagttgtcctaggtgaccagcctcgtgcccccacttgccccgttgagcaggtcgagattgcggagccggaacccgttgaggtggatgctagcacaactgtggagaaggatgagcctcagccattcgtggacgagccccttctcggaactgacagctctgatatgacggactacagggcgttctttatccgtgacactgtcactgacggtacaaagatggccccaaacaccacgtttcgccagacctggactctctacaaccccggtcctttagcatggcccgttggctgtgatgtgcgcttcgtcggtggagacaagatgttcaacgtcgatgtctgccacccgtctagcgtcgagtctattcgctcggccatggaaagcaccaagttggttgcccctgtggagccaggcgagaaggctgactttactgtcaaccttcgtactcctcaacacgaaggccctgctatctcctactggcgtctgaaactccctaacggtgtggccattggtcatcgtctgtggtgtgatctcgaggtagaaaccgcttctctggaaaaagctgagacccacgagacatactctggcgtatctgaaattgccagcagtggcatgatcttccccaagctagagaaggaatctccggagtcaagcacttaccaagccgaggctcctgccccgcaggcaccgagcttgtcgaattcttcggaagtggacgttttagaagacgttgagagcctgactttggacgataccttcactgacgccgacaccggcttcctgacggacgaagaatatgacgttcttgacgccagtgatcaggaatatattgaagccaagcaggccacaaactgaaaatgttcgaaggaaatcatcacgacacgatatgggaatgggaatttgcgcaactgcactcttttttacttctttttcttttcggactttgccgctgaggtctagtcactccgagcatgactagacttaatgagattgataatttttttttggcctacgaaaacaagcaaagaaaaaaaaagaaccacattttttgcctgagatagttcaatgcactttcgctgttttgaggatttggattgtgtagtacgctaaccctattaagcattgatataagcatcgacataagcatcgagtccttgcctcctccctacatgtatgcagtcaccaagtctccctgcgagctgccaagagttccaagtttctgccctcgcagagattcccgaactgaataacctcgggaattcagtgaggggtcgagaaatggctataaatttggactttgtccctattttcgctttatatccccagattcattcacattcgatacaatgggattaagcatcgtcggcctcggcctagtcgctctggtcgccttcttggctggtccagtcagccatttcgtgcagattgcaggggtcttcctcacgcctaatccgacagtgctagctgcaggccagggcccaatctacatccaagacaccatccattgcgaggatgtgcattactaccgcccggcgaacctgctgttcactgcctgcgaggacgacaaaagcacgcggtttagctggttcccgccaattggccacttcctgccagtcacgacccaaggctctattcatgtcgtggatcccaaggtgactttgttcgaggcagattcggaccaaatatcaaaaattaaccccaaatatagactatgaaatcgactcgtctggcattcgagaacttccaaggcaccttcgtgacacatggaatcgatgtcatcgaggaccccgaggactcagacgccgtctacatttacgccgtcaaccacttgcccaacccggcatactttgaagccggcgagcccaaagacgtccccaaagcccagtcccagattgagctcttccatcacgtcctcaactccgattctgtccgacatgtgcgctcaatcagccacccgctcattaaaacccccaacgacatctacgcggtcagcccagtctccttctacgtcaccaacgaccacttctaccgcgaggggcccctgcgactcttcgaagccgtctggcgctcagccaggtggtccaacatcatctccgtgcagatcgccgatctggcaagcaaagacgcacctgtcgaagcctccgtcgcactgacgggtctatggaacaacaacggtctcgggcacggccgcactgacgacgaagtcgtcattgctagcgctatgggtggcgagatcttcctcgcaacccggcatgagtccaatcactcactctccatcgatacctcgattgccttttctagttctctcgctgataacccgtcctattatgaagacccataccgcactgactcgcatgatgcgagcggcttcctcgccgccggtatctcgcaggccattcgctttttggggaatgctaaggatccgaatgccaaggatccgatccaggtgtggtatacgactctcaattcgcacactggggtctgggagaagaaggtgctgtttgaggatgatgggtctagggttcggactgcgagtgccgctgttttggtgcctattgagcctaaggctagtgaaagactagcttggctctttgttactgggttcatgtcggagagtatggtggctgtacaggttgagctgtagattagaattgtaaaacattacgcactcaaaaaaacaaagaatgttggttgttctttgccctgactttgtctatataaattccacttcctcccggattcaactattcctcttctatcttacactatatcaaaagctctatatatatttcatcaacttaccatctttccagctcttactttatatacatatttccacaagttccaacttatcactctactcgcgtacagaatcgttgttgagtcgagagaatttcagaagtatgtattttgtaagactgctatttctaccaaaaccaaccatcccagttcaaaccaagaagccaaacgaaacgccattgtaggccgtctcctctctatcaaccttgatcttgtcatctcctggtacgaaacacaacttcgagacctgcgatggggaagaaataggaatgcgcaaactcctagctcagccaaaagccttcctggtcttcacctctccaaatagccatgtcgtcgtcaaatccggccctgtgtggagtcttacatatatacaaggaatactatttattcaatatggggtatatctcccgcccatcctcgttgatctaagccgacagctgacatcttactatatagacaggaccaataatcaccagtcattatcagaggtctagatacaccggatcttgttgattcctagctcggatatggatgcagcaaggagggaattgcaacagcgtatcgacgaagatagtcgaggccctgctgaacgctgtgttgcgctcctctatgttcggtggatgatatccgcctacattgcatactgcgcgttgcctctgacgatcctgttgtctttagaaacctgcgactattttccctgcccgacccagccaattcctgccgccactgtaccaatagtcgcaggtttctaaagacaacaggatcgtctaaggccgcgcaagacacagtactatcagaagttctaagttctagcccggtatcaggtttaaaaccaaagcaactgcttggattgcttcttgatacgtcgattcagctttgattccaagtatattcgttattgtctcctcacatggaaaacagggccgcgatataattaggctcgagtaaacatagtggttgaaaatcccaacacctttagagacaaagttcaattgggttgacagaaagcatgtagatgtctgaaattgaagtgctagcgccgctgcaatgcaaattggaagaaaaagccaaggtaaataacaagatttaaaataacaccaagtagtacaccacattcatctcatcatttgatttctctgcttcatctgtctgacttgcccggagtctgggaagagaatgaacagtacttgtccttgatcgcgatgacctcgtaagttccctcatcagaggtcttgatggtcttgacgttttcgtatgaaatgtcgtgtttgatatcaagaatctccgacttctttcccttgcgggcattggagctccgaatgtatctgtggaatgttagcagactgtcatacagagcatagctagagactattgacttacgtgaattcgaatggtggtgtaccccagaactcaaagtgaagctcggcttctccaccctcgtgaatatccaccaccgattctttacccttgctgatccgcacgctcggcatggcgtggataaccttggtgatgtctttgtgggccttgcatttcccactggctccgtcactgacggcgttgatggtgaactggccgggaagttccgcaatacgacggaagttggtggtttgtgtagtggccttgcgcttggcgccatcgaacgtgtagaacacatcaaatggagcatggcctgacagcgcgaatgaaagtcgttcgcccacacagtagtccatcttggactcgagcgggacaattgtaggaacgtcggagatggcgacccgcaccgaggaggcatcaagctcagtggtcctttgacatcctcgagaatcgcgaaccttgtggatgctgacttggtgttgccccaagtcaagatggcgacgaggaatcagcaatttatggcgattggaattaatcttggaaatcgtgacaatctccggtttggcgttcgagtggtgtttgatgttgatctccagcgtgaatggtgggacaccctctaaggtaatggggatggattcctcgccgttgatgtcttccttgcagaagccaaagacgtggccaggttggtcgaatttagcagacggtagcgggttgaccttttgtgtcacaaccagatcgttgctcttgggatcgtggtcgtagaggctgtcgccaacttgggtgaacttgtagctgtattctccagcctcggaggtatccatctccatcgaagtcacatgaagagcagacttcaaagcccgtggcttcgccgcagagaatcctccacggtccgtcttgcgtcgcttctcgtattgaacactgtatggaggattgcccgacagccgaacttctaggctgtcatcgtcgccttgacagacctcggactttgcaaactctttagcggctccaatgggtgagccgtccagggcagtgatttcgggccgtggaatccacgagacctcaaattcctttgcagactggtccacggttccaggacaaccggcgtcaaatacttccatgatctcatacaagccctgcttgtcgacggccaagacactgttttcgtcccggaaggttttctgaacgggcgccgattccgcgtcaacattcttgtacttgacagtccaagggcgctcgccactcagcctcaatggaagctcaatcttggagccctgcaaagccaagacacttctcttcttgtcaatctgaccgaaagagacgtgcgggggctgcgagcgggcttcaatattgatgctgtccttgagagttcgtttgcaaccagagatatccttgacgctggtcagagacacggtgtagtcaccaccgctgaccagtttgtcagtcatgatggttgccacatcggtatcggattcgagtgtcttcctgaatcgcttcccattgtggacgatctcatattgcaagacccaaggggcctctccaaggaaagatacttccagagaaacagcctcaccgaaacaggcagttctcaatcttcttgataggaaatgagccgaagccggcggttttacatcttgttcaagcaccggaatgttgagagaccgtggcgagtagacggcatcttcgatgtctatgaatcgataggtgtatgagccggcttccgacggggtgaaatcaagctgcgtgcgcatgccatcgatggtttgtactttggaaacaacgcccttggagctctcaatgctgtatcggagagagaaaggaggcgatcccgtgaggtccaaatccacaagtaacccaatagcgttgttggcacagcggtcgaatatcttttcagctttgactgtcaattctggctcaggcgggttatgcaactggcaagatgaaggttcgaggatctctccaggacaaaacttggtagagattgatgtcaaggcatacaaaccaggctctttgatgtctaaagtctgattcatatgcttcagatcgacgatctgttcacgtgctgcttcttggttgttacccgtgaacgaataaccgaccgaaaagggaccatcgttagtatatgcgtgaccgtcgggatgaaagctcaaggggaacctcgtgctgtctcccttggccacttgcagcggattctcggaattgcacgtttgcagtgacaactgcgggcgctcgtgaacggagaattggtaccactgggattgcgactttgtggacggccgatctccttcatcaaagatggtagaataattggccacgtttccaatagcatcatggacctcttcgatggtgtaaaaccattctccgccgtcgttcaacgattcatttaatggaacctcaatcttttgactctgtgcccacgaaacgtcgggctggttgatgctgtacagagcagccgtagttcttccattgagcagcggagagcgcagatgatcgggctggatgttgaggaccgagaagccacgatcgagattgttgacctggcgactgtatttgatcttcaacggaggtgtgccttccacctccagtttgaagtcggataattctcctttgcacttgtcgatgtgtgagtttttgatcaaggctcgcgggcaagagaccaccagcgcatcaaatgttcgcgtatgaacatcaagctgagactcgtccaccacccgttggagacgatagacacccgttttgcgcacagggaagagcaagtcgcggtggagttgacccggaacatgcttcttttctgcctgctttttaagagtcttcagctgcttcgctggaatgctaatggtttcattttcgccggtgttaaaatctagacgcaacacttcgataaggatcgggtcggtctggttgacacggatgggcaggtcgattgtggattgcagagaatcgaggcaaagcgagtttcgatccggattgagaacggcagatctattataatgtcagtatgatctgaggtgggtatattcgaacgggatagcttacccctccggcagaatgtgcacaatttgccttcccaggatcaatgacgcattgtgaatgatatcgccgggcttgaccctgcgctcagaaacggataattcgcgatcgtatgccacctttactagtccagtaaaccatgcagcccaaggaatctgcaggcattagcgcggatcgacagtttaaaaaaagaagaaaaaactcactgggatgcggaacatcaaaaagacattgcccacagcatgaagaaggaatagagtgagcgtggtcgggaatgcccactccagccaaggtatacgcagagcctgcagcccaaccaagaagattccatcgatcgtggcccatttcaacaacaaccaggttgagtcgaggtcatcggacgcagtcaaggactcgtaaatccgccacgcattcaaggcaaaatatattgcaacgacatagagtcgttgagatggagcatcaatcaaattggtgggaatcagtggcacatcggtgttcgcgttcgggggtggtggtcttgacgccctcgaggccgatttggatggtgatctgagtggcgttcgcccagcccgggtctctcgtggctgcgatcgcgaaggagtctcaaatagttttctccttccagttccagggattgttttaggtgtctgcggaaaggcagatgggaggaggggagtgccgttcatggcatgctgtggttgccggagctggcgaaagatgggggatgtagtgagagtgcgatgctggcccttctagagctgtaagaagttctaaatgaagtccaaggaaggtgtttggagctgtccagtggtaattcgtgcctatagcagatggaaaaagaaacaaaaaagttggagacgcgggaagcgcgtcgggagaagctcggcccactcaacgacatgacctaaccgcttctccctgtccctgtattgtcttctattgccgacgtctggtgtctagttctataaaagatctcatatttttcaagatttgatacctggctccctttctgttcccctcagtgggaagagcaaacttactatcatctcaggactccttttatcatagcttcctctcatttcaatctcatcttgaagctctaaagctctacagctctacagctactacttttgaaaagaaccgaaatgggtcctcgagttaaaaggcgccgcctgatggactcagacgatctcagtgatgatatctgccagcctgcgtcccgtctggaaaaagacagctggaatgggttttgtgaaatcgaatcagaaccggtatgtttaactgacagtggccttagcggttctttgcttacggaattaggccttatttaatgtgatgctacgtgaattccaagtcaagggtgtaaaagtccaagaagtcgtttctctcgacgaagaaatgatggcatttcttaagtatgttacttgcagtccctctctatgctcttacatatagactcgatggctgactatgagcagtaagcctgtttacggcttgatttttcttttccgctggcgtgaagataacgatggaaagcaggaagcgacttgccctgacgggctgtggtttgcaaaccaggtcagtcccctattctttggctgaatggtcctttactgattctttatagaccgccgacaattcctgtgccagcgtagcactactaaacattgtcaacaacatcccagatattgatctaggagagaatctacggtctttcaaggaattcactatgcctttcaccccagcgttgcgtggggatgcaatcaacaactttaaatttgtgaaaaggatacacaactcatttgcacggtaagcccattggcagcttcttgaccacccagatactaatttgatattagaaaaatggacattctcaattcagatttacacctcaagactgaagctaccactaggaaaaagggatccaggggccaaagtgctgatgaatccgacgccaccttccatttcattgcctttatgcctgtgatgggccaactgtggaagtttgatggcctggagcgacagccacaagcacttggtatgcactcttacaaactagttgggatgacactgctgactttagtaggggaatgttccgaggacgactggctggaactggtccgacccaatcttcaggaccgaatggctgcatacgaagaagaagaaattgaattctcgattttgggactcgtgcgagaccctctgactgatctcatcaacgacctggctgtcaacgtgagaactttggaaattctcaacaagcgtgcctcatccctatgctcattatcagatacgctcgatttgcatgaatctgatgaaactgtacttggccctgacccttccctatctctgacacgcgaagagattgatgtggcagtgatcccccaggaagcactggatgattaccagacgtgctccgatgagaaattgcacgagtatcggcagaagataagcaggaggcagcgagaactccgtctacgcattcgcgaagagcagctatctcaccggtcggattatgactacgcagccggacggcggtttgactatgggctagcgatacggacgtggctccgactcttggcacagaaagaacagctgcaggagatgtcgacccccgtggcctattgattggatgatatctgctatccctctccttttctatctcagacgtgcttatcaggggacgtagtgatgtgacctccgtttccccctcaattgatttggcgtcgagtacttcctccatgtcgatcatcctagaaatacgcaatatataccagaaatctaagaaccataacaacagtcaacgtcaaaatataaaagccctggaaagtgacgcctcaggtaccccaccgggcaaaaaatagttcaaacgtcaccgcctcgaatgttgttgagcttctcttttccaacctcctttttggatgatgaacttttgattttggcgtggaagtcttcggaaacttgaaccatcctattatccttgtttcggaatagaggcagggcccgagagatcccctctctccaatttgccaccctttctattctactccccatctacctcaccctctctctttctctttctctacaattcctcgcttgaacatacaccatgtctgctgtcgcagtgcctgaaaaggcaccagatgactcctccaagctgaagaccttcctctccatccttcgaaagtaggcaacccttccttggcccccgctccgctccgctgcgctgatatagccagatctcagacactaatatgatcgggaattaggttcgtcggtgtcgcagatatcgcttcagttcgcttttcactcccggcacaactgctggagccgcgaccaaacctgggtaggtcattgttcgtgttacgctgtgcggggtcagtgctgactgtggatggctacaagaatactggcattatctagatcgaccggagacatttgcgaggtcaggaaatatgcccatatttggcggacgcttgtgtgctgaccaggagctacagcattggcaaatcggatgatgagctaggtcggatgttggaggtgttgcggttctggttcactaaggatctggtatgtttcggctgctcggattcacttgactacttgctgattgtgctacagaaatacgtcaaagggaaaccctgcaaaccatacaactcaaccctgggggaattcttccgagtgagtcccagtttcttcggcatttcaatcacggcaatccattgctaacaccctttagtgcagctgggacgttagcgacaatatccccgaagaaacaaatcttcccggtaccaaaggaatcaccaatggctcctccaccgtaaccgacggcgacgagaaagtcaaagtatgctacctcacagaacagacctcccaccacccgccagtctcagcattctatatcgactgccccgaacgaggcgtctcagcgcgtggatttgaccaactcagcgccaagttcaccggtactagtatccgggtgagcccgggacagcacaacctcggaatcttcgtgagcatcgaaaagagaaacaacgaggaataccagttgacccacccaaatgcccacctcggaggattactgcgcggagcgctttcagtcacagtcgccgacacatgctacgtcacctgccccaaaacgggcctgaaggcgatcctgcagtacttggaagagggctggattggccggtcacagaacaagctcgagggcgtaatattccgctacaaccgggacaatgatacgatcaatcgactgaaagatgtaccagagagtgacattgtcgctcgtatcaccggctcctggcatggaaagatattcttcactccggcgggcaccaaggagccccgtctgctcatcgacataaccccgcttaatcccgttccaaagaccctgcctccatccgaacaacagctgtccaacgagtcattgaagttctggtcgggtgtgacgaacgccattgtcgagaagcagttcaaccaggctaccaagctcaagcaggatatcgaggaacggcaacggcagcgggctgcggagcgccttgagaagggtactgaatggcgcccccggttcttcactggcgccgtgacgccgttgggtaagccggagctcacagaggaagggcaaaaggttttggagggaattcgctcgggcaacttcgctttgacggaaagtacagagcagggcgcatagatctcattgtgtttcccttgtgtaagcaacgttggcgtatctggcatgcgaccatacaaccatcgaacacggcgtctctttgttttactcccttttgatctcttttctggttatacttttattctcacatagaccttattctttagaaatctgttttggattacaaaattgaaatagtatatcatacataggttcaaatagaacgattaattctattcataaaaagaatcacaaccgttggtccatgctaacgccgccagactccaatcatcaagtacgtcaacacataatccatttcagatcccgagctcagtctcaggctgcggcactaactaccttgaaccctgtactgacggtcttggtaatctcctcattcttatgcggcagaagagacagggcatacgcaacatcgttccactgtcgctctgtttcgcaacgaggaagtcgagcggccagcttgtcggccagctggcgagcgtgtttttcctaggctaacattagcatagatcattataaacgaagaagagagagaaaaacgtaccttctcgacaaaaccgatcaagaacttgacgatacggcggagggatgcttcatctagattgcgctctgcactcagcagactgaacatgtcaacaaagtggttgtagacggcattgtccttggttgcaagttccgtgaagaacatgcgagccagatccgcgatcttcttgtcatcatcctctagacatttcgccatctcgcctagttgtcccttgaccttgacttgcccagccaagatgaggaaggtaagggtcatgagacaggtgcgcttgacagagtcatcgtcatcattcaaacgacggtagaggaaatctgtgttctcgtcgatgaggtggttgaagcaaacggccatgtcgcctagtgcaatgacagcattgctacggacgataggatcttcggaccgctccatgatagtgatcaggagtggcaggttcttctcacagtactcggcagatacacacatgagtttggcaaggcagagcgtcgcagaggcctgcaagtcacgatccgggtaggagttattgttggccaaaatctccactacaagcgggccaaatttggccaagagggaattctctccatagagtagctcgcgttctcggatatgggccatggcttcctggaagtcgtcttctgttgttccgccgataagatcaagttcgtctgcttcggcattgtcttgttcatggggagcagtggctgctttgttcttctcttgttcgactttgcggcgtttgaagtcaagctcacacagctctagatgcacgatctgtttgattgcgacgtgaccgacaacgtacagcaactgtgagagtgcagcggatgctggcttaggcttggattcctggccatcgacggatgcagtctcaggccgttgttgctcctcgtctccgctgatagaggcatcggaggaaggtggacgctgttgtaggtgtggcgcaaagacgaatctcgtctttcgtcgtaggatatcagagcaaataacgtcaggatgcttggacaaagtgtaaatagcgttgagggcatgctctgccactccataccattccttgctggctgtttcgatctcaagcatggctaccaacttgaccaaaaccgagtggtcgctagcgagtttgggaatcccaacaacctcctttgatttggcttgacgcccggggatcatgcgccgcaaagcaatacaagtgtacttggcgagcacaaggtcagcccttcctaagccacctagaccaattcgcagcatggcctcgatctcttttaccacaatctctggatctgccagagcaagcattccgagaacaatgatcgaaccccggcgctgagtccgtgagatttccttcttctggatactgtagacttgccatagcttggcaatcactgcgtcagatacgtttccagccttcatcatcgtgctgagcaactgctcgagacaggtaagttcggcaggagttgcaccaaacgtcaaactgatcatgttgcgggcgatgtagtttgcagcatcgttgggtgtgaaagagcctggtgcatcgaagaaaagagccttgtaacaatcaataagatgtgtctggacgccttttccttcatcgctgttgcccttggtccaaatcaggcgcagcatgcggcgaattccactacgggcagtctcaactttgtatgcatcgagaacaacaaagaaatccatggcttcaataacctcgctcttgttccgggatgcgagtaactgtgtcacgataatggacccggaatgaagcacttcaataaaccggattgcctcgttgtaatacttcctcgtcagttggaggcgtgtcatcaattcagaggtggccgcctgttctgcggctttctgcacagcaacagccttctgttcatcactcatccggggcgcttttgacggggaatcatccgggatctgtgtagcgtcatccaacaattcgggatcaacctgagtcatgtcgcctgccccaaagccgggcgtttcagcaggacgcagggaattcaactcggcgtcaaccgcgtccattctatcagtccactcctttaatgagaggagcccgccatgcataacactgaaaggatgtgtggaaacaagcttggacagcagtttgatcgcgttgcgtcgcacattgctgctcttatcctccaagcttctagcggcgagttccgctgcagcctgtcgccttttcgggaacttctgctccagatcgcaaatccgcatgaatacctggatcgcgcgacaccggcagtaagggttgatatcaaggaacctttcttctaatacgtcgaaaaaggcgttgatctgggtcttataattatcactgcgttcttcctgccgactgagatcggaaatgaggtttccacagacctcaatcactgcacagcgaagagtatatgcctgtacctgttagtggagctttgggcaaattaagagtatcactcacgtcactatctagctgtttagccagaagggtcatttgcttgatgatcaatcttggcgcaagttcggacagtttgataatgaatgtcgatacagacttggggcctctcgtatcattagaattaaattccttatttccgagctccctacatgtaaagttagcaactatccggtcggtttgctgatataatctcactttaggatctcgtcggaaagctgtggatagtcgtattgttctgctagaatatgcaggaattcggccatgggttcagacagatgttcgaagtaagtcaagctttgcacaatcgaagtttgagctcctatgctagagtcagctatcgctcagccggaatatgcatcaggacacctaccaaaggcctggccatggtgcttgactgcaatgcaaagaaccttgaaagcatgcatgcgaatggccatgctcttcacccgctgctcgctctcgaggaccagatagattgtgcgcgtgaatagggtaataaaagtgtcacgatccgaagtggtcaaaaaaatgcgtcctagcttgagcttcatcaccttgcacatcgtctccatggatatttgaatctggggcgtccaatcccactggccgctattggcggatttcttagatttgggtcctcctcgtcgaacgggtgctgcctcggtgggcttctctgcagccttgacctctacggcagacaaagcccactggagaaggaacccgtacatctccaaaagctgcttatggtgttgaataacatcctgctcgtcggattcaaggtctccgtggatgacgtctgcctcaacagacaggccagaaacaaccaaatccaaaagtttgctcaagtgctttgcaggaagtagggtcgcgtatctgcaagagtgaaaaggatcgtcagattcgagtccaagcgggcgccagcctccatgggcaagttgggaagggaccggggcgcactttagtagaaattgcagcgagtcaaataacgatgctcgtgttaatgcctcggggttctctgccacagcgtccacgatcgggttcaagatactgtcaatcagcgctggcgaaagttgatccggatccgattcgcaatccaacagttccgggtccgcatcaggagtcgggatcgaagcgggatcactcaaatagtacttgagcgactcatttatgttgaactcgattctgtcctccattgtggtgtcaaatgagaaaaagaggtgaaagcggggaggaaagccgatttgttgataagccccgttgtttggcttttgcctgtttgggtgcagcttatgtcatcatgttgtattttaccgctaatgctgtgccagacccctctcatgtgttaccgcaccgccttgtattgattgatttggctaccagtcgtattgtcatatttgtcacgcgtggtaatgccaacctaggttgttgtgtttgcattcttatctcggcagttgcgatagaacattgaaagaacttgactttgaagcaacacgcgacacgatcttatgactttgtttctccactttgtactcagcacattgaattcgaagactcctcattgttctccgtgccaccatgtcggccatacgcgctgctcctggtgtatttgagctgaagcgcaacaagtcccgtcatgagccacaattgcaacacaaatactcgctgggacacgacgatgaaccggtctcgccaagcgatgcaccccaggagagtgaatatgaggaagaggtggaggaatcggtcagagaggatatgagaaagcttgaagacacattcccaggaatctcggatcgcttccgtctggtgaataggatcggagaaggtaggacttgaccggttccccgtcattggcgggcttctttattgacaagcccaataggtacattctccacggtttataaagcagaggaccttcattatgatgcacaccaaaatgactgggatgtttcaacaccaacacaagacaactatgcggagcctccatccaaacgacggcgattcggaagggagccaaccggacgaaaaaaaacgaaattcgtcgcattgaagaagatctatgtgacgagtagcccgctgcggattcagaacgagctagaactgctgcacgatctccgaggatgcgggtctgtctgcccgctgatcactgctttccgataccaggaccaagtggttgctgtgttgccctatttcccccataccgactttcgcattcaataccgcacattcatggttgcagacatgcgccattatctacgatccctcctgaccgcattgaactcggtacatgaacatgaaatccttcaccgtgatatcaagccgacgtaagtttcattcttcgacggcctgaattatgctaatatcttgaagcaactttctctacaatccggacctgaaagaaggcgttctggttgacttcgggcttgcggaggtatgattattgaccgccatatgttgatgcgtttactgattgtccccacagcgccaaggctccgaatacaccaacccatgtctatgtactcatcaaagctacgtccgtcgaagccggatcctttcaagttactactccaagaaccccccatccacggggttttcagccggctaccctaagaatgattcacggccatcacgacgagcgaatcgcgctggaactcgaggctttcgtgccccagaagttctccttaaatgcacgtcacagaccacaaagattgacatgtggtcagtgggtgtcattcttttgactctactgggacgtcggttccccttcttcaactctgccgacgatatcgatgcgatgatcgaaatgtcgagcatcttcggcaccaaacgcatgaagactgctgcggccatgcatggtcaaatttttgaaacaaacatccccaccatcggcgagaaaggctacagctgggagaagctggtgaaatggtccagctgtgtagaagatttgacggaaagtgagcagcaagcaacacgcctcttgtctggactgatggaactggaaccgtctaagcgcctcagtgccgcggatgccctggagcatgaattcttcacggatcccgttcaccatgatgtgccatggggaggtaacccagaagaaagcgcagaatcaggagaggaggaggaggcagatgatgcagacgaggttgccatgctatgagacccaagattatttgtacgatatgtgagatcagttttacgccatacactgcataccactttattcagggcaatgaagcagccttcatatgaacaatcccgctgtatgcctatctatccggtatgcaatcttttctagctcgcttctccgaaatcgtagtgcccggtctccgcggcatgcttcgtagcacctttctctccggtgaatttgcctccacagacgttacagcgaacagtgaatccagaagtgtccgtgtagtagtgcttgctttgcaacacctggcatagttctttagccctttgcaagacaaccggatcaacagcctcaaagatctttgtgtcatcatgcgccagtggattggcacgagtgtagggtgggtgagaaggggacagcgcaaggacatcgtaatgaatccccgaatagaccacaatacaccgtgttggtgctccctcattaaactggaacatgtgcaaagtctgtacatcgatggagcatatctcgatattgaagtattcgctgagaatcttgagttcgatggcgccaccccacgagtcctcgttctggatccaggtacagtattcgtctggttttttgcctaaaatcgctgcagtatattcggacgggttggattgaatagctcctgcgacgatcgatcgtagctcaaccatcgtatccatgtcgcccatgactgcagagcccactgctcggaaaaggcacgagttgtcgtcgggcatcacccggagaacgaacgttccggcatgctctggagaggcaatttctggcgggtcttcagcggtgttctctggtcgtctttgcgacaatgatggctgcgacggctgtgatggttgtggtggcgctgttcgggctatgggcgcatcatcgctcacgccccggctggccccctctttctgtgcgacgatgagtgactccccatttagatttatcccaacttctaatatcctttggtctggttggaagctgtcaagctcaagtggtttgagagggtatccgtatttgacgtcaaaggcagcaaggccggtcttctccgctatttgggtttggagatcttcgatggttgcagtgtcatccaaggtgacagttgattggcctgaaggcccacggactcggattctcattgtgatgaagtcccaaagaggccaagacctaagggaactgtgaggtatgttgtagataatcttaagaacggaggttccactgatagggagatatgacgacttccgtgtggggtagttatacctgggtacggagtataccaaggcagtctggaatgcaagccaaatggtatgggccctaagaagagatggactgatatgtaaatcagtagtctgttcaaatctaaaacagtgaagtcgcaaaagactgtaagtaaggggagactacccaccaaactaatcattgcatgcatgtagccaagagctgcatacatattgtacattgaaagtacgctgaggcgtgataacttcaattccagtcacagcagacagttgtagcaaagatcctcatagaagagacgtgaatagagacatgattgagcccaaatacagcctcttttaatgaaaagatcatgaaaggtgaggccatcgtcatggaatgtcacgtgaaatgtcatggattaccgtaatgtgaaatggccgctgagtcagcaatagcttcacctgtccactggacgcgttggtgaaacatcctccgacatctacagggtcccctattgtcttatctgaattcgagcttgcttcatttgatttagtctaaaagattgctaaatttacccttgcgtggaaacgcgcgtgtcgccaacgacatggagtccgaaaaagagctatcgcaacccccgcgcgagcaacccgtcaactccatcgagaatgacggtgcgatcacgcgcgaaacttggaaaatcatgatggatgtggtcctggcaatttatgactaccgagaagaggagtgcgactgactttatatgagatatatagcgatcgctggctaattgttatcttgcgcagtggtcatgacccgtcacgattgttccatcgcagtgtcaacaagcgctatgttcccgactactatgagataatcaaggagccgatggccctgagtattttgaaagcgcgcatcaacaaacgtgaatacaagcacttttccgaatttgtccgcgattgcgccttggtgagtggttgcgccctccagatttgcaactagctaacgatatagatcccacacaatgcgcagacatacaacagacccaaatcacaggcctatgaagatgctctagttgtcaaagtatgtctgagtaaagccggtcaccctgggcattcaactgacagtttccaggaagttttcgccgccgagttcaaaaaactggccgcccaaggcctgatccccgccgacgaggcagagctacccgatcttggagagatcccagaggccgatccgctgccggatgatgaggaggaagaggaggaggaggaagaagatgaggatgacgactctgaggatgagggccgacgaagaaagaagcccggtcccaagcccggattcaagcgtggactgactcaaaagcacgaacccgaccttcgcaagaaacgaggccgtcctccccgcgtggacacacctatggaaatccgcatcaaaacaattctgaagggaattaggaagttcaagggagccggtggccacctgaagatcacacactttgaacgcctgcccgacaaatccgcttatccggactactacctggagaccaaggaacccatcgccatcgatattatcaagcgcaagtccaagcgcaagaagtacaactccgtcgatcatttcatgcgggaccttgacctcatgttcgaaaatgccaaggcgtacaaccagtcggacagtcagatcttcaaggatgcggttgatctgcaaaccgagtcacgaaagttggccgaacaagaaaagaagaagcctgatagcgagttcttgatggaagacggacgcttcccactccctgatggtattctccaccgcggtgaactgtggaaggttggcgactgggttcatatccaaaaccaaaatgatgtgaccaagcccatcgttgcacagatctaccgaacctggcaggactccgatggggagaagtggatcaacgcatgttggtactaccgtcctgagcagaccgtgcatcacgtcgacaagcacttctaccccaacgaggttgtgaagactgggcaataccgagaccaccggattgatgagattgtggatcgctgctttgttatgttcttcacccgctacagccgtggtcgcccaagagatcttgcaccggataaggaaatttacgtgtgtgaggctcgctacaacgaggagaaacacaagttgaacaagatcaagacatgggccagctgtctaccagatgaagtgcgagagaaagactatgagatggatctctttgatgtgccgcgcaagatcaagaaaattcccagtccgatcaaacatcttctcagagaggatgccaaggagaccgatgaccttcctcggccaacctggggaaccgacaatgccccccctcttgccggagctgttcaccgccgtccacgagatgagaatgtaagtctttttccccccacatgagaaaagatcctgaaagctgacagcattaggaatcaccaccacccgagccaactccatccccgcctcctccttccttgccccagtctgtagtacctcgtcaatcactgggcctgggccaatcactttccagaacagccatgagcccaggcactgctggactccaaacacgtactccagcacccccaatcatcatacacactactcccgcccccattcgcccaccgggcttccatcaaatgaccccatcccaagcctttacggcgtccctccagcgccgcgcaagcaaccttgctaccccgcaaaccccagcaggcgcataccagccctcaccatcggcccagcaaacccccgccaccggctactctcaaagccgcatgcaagccccaccagccgtgtacaaccccaacgcaccgcggcccattgaggtctttcacctgagcgacacagccaacgctgccatcccagaagacatccgcgaccaatttcactgcgacgaccaagggcacgtgctcttcttctccacaccgccggtggattttatcccgccctcgaagaagaagctcggccattccctcaaatacctcgctactaaggaggagcatcagaggaaggtcgcagagcggaaacgcaagctggctgacgagaagatggaacgtgatgaggctgcgaagcgccagcgcgctgaggtggagactgcgcttgcggcccgtgccgaggcgcttaccggtaaggcgcttgagaccttggtgcagcacgtcgttgcgggtacggatcagctctatgaatctctccattaagcatggatgatgctatggaccttgatggaacgtgcgagcgtggttctgcgaggaatcgccaggctatgggacagtctgcggagaatggtttggtcaatttggaaggtactgctttgtacctgcacaaggcttacggagaaaaggcgaacatactggcgtggcttggcgtaatcttcggaggcattctgttttagtttaagatgtgtatgattaggtatcaaatgaaatgattattatgtatgttactcctgttagttctaactagccataccaacctactccttttacgaagactagtatcaaggaattgtttatttgcacatctccagtttgtacatgcctgcagtcctgagaatcaaaaccacatattccgacagtaggggacaaaaaacaagggagaagaagacaaagcaagcacctagtaagccccagagatcgcagtggtcgtggaatcatgaaacaaaagcagagatagtaaaagaggcgagatatgtcaacccaggtacagtgcaatatccatgaatggaaacgaataaaaaacagagaaaaggcagagattaatacagtaaatggctggttagagagatcctctgaaggcccagcaacgagaaacacatatgactggtctaaatgattccaaatgatggaataaaacaaggcagatgatgctgagtgccagtttatgatgagagggatgtgaagtttttttttttgtgccttttgtttttgccgaatcagatatctcacttgaggagaaaaggatgtattgtcttcgaaccttcttttgttttgtctctttgatgtatgttgcccaattgaactccgatgccctttttcctgtgtttttggtgagtatgaacatgtcccaatgttggacttggacttgacatgtcgtgatgaaattgattgaaaacaaacgacagattaggaggaactttctttgttctcagtccacgaggcactggtccgcttgtggccgacctcttcctccatgtcgaagaccaggtcactctgctcttcctcctcaatcttgcctgtgttgacaggaggggagatgattcggtcaaatcggccgataggagtaggaccgataggggtaggattgctgagactgctaggaatggcaggcgacggacgagcagaaccagggtgaaggcccatgccgctgagctgctcggagataatggacattgaggattgacgtccagggctcgagatgaacgacgcttcgtgggatacccggctactaccaatgggtcccaggctagggctggtgattgggttcagtgatgactcacggagaggagagccgatgtggaaagaggaagagccgtgagattcctcttccttgcgctggcgctgcttagcaaacaatgcaccaaagcgagacgggctcgacgccaggggagaaccattcttggaaaagctggtgctggtcatgccaaggccagtgaggtcgcggtggctggagctgaggtcgttatcggtccgggagaggcggcgcagcttttcctgtggagtcagaacatcgtcgtgcagattgaatggtaggtaatcctcttccatggggaagttctcatcccattcctcaagggccgtgggacgaggaacactagcggaaaacatgcgtggcctgacggggcgcgacgagtgcatgaaccgggtaccgactgtatcttcaggggcgggaggagaagatcctatgttcgatgaaggcttgcgcaaactggtgccatagccgagatcgcccaggttccggaatatatctgcatgagccggtctctggggtggtggcgattccaatccaaattgcgagggcatggaagcagccaccggaccgtaacgggcagcatgagagataccttgactgtcgaaggaagccgggagccctgcatcgagggcgctgaggtggttgttattaggcgacatgaggtatcggacatcttcagcgggagatccatacttggagccggcatcggatgccaggcccgtatcgatcgtggggattccatcataggacggctgttgctgcccatgcagggattcatactcctcctgtggggccagctgagcatatcgaggctgctcgtgaccgttcatgcgctgttgggagagcaccgagttggtcaaggcggagtcctggttgacataggcctgcggattcacccggccgcccagattgagatgaccgcttcctattcccatgttcccagtcggccggttgactctccgtccatctggtaggatatgcgccagtgcgcattttgcgccgaatttgcagtttccctaaaatcattgccccgttagcttccgatggcctcggataacacgccatgagaggaggacttcgaaacagttccgatttcatacctttgcaaaatacttgcacggagcgtaatcaatgccggcatcggtggagtgtaaaaacggacaggcgggacctgcctggcaggcaccctggcggaaaaatttgcaaggaacatgtttggtgtctgtatatatgatagcagagggttagtttcgcattcgggcgtcgctacaataatatgaatgaatcaagtcaagacttactcttattgctctggttcggcgggctgcgggcaacgtcaagtgccgatggattgcgagaatgtccgttctgggggttctggggtgccccagaggtagccggaagaggcgcacgacctctcatctctgaatgattggctcgacgagatggcggagcacgagaagacacctgcatagagacgtaggaggggttggagattgaagaggggaaagagagataggcccaggcggtggagacggcggggagatcaaataatagatggttcacgacaatacgaagaactgtgaagaagtgaagttaacgcggcgtattattagaataataataacatcattatgttatacgatctcaccacagccttgtctcatatgataatgttcatctgattacggttcgcctcatcccgcgttgcctccattccataccggcgaatcagatctcccatcggaaatagaatacacaccttaaaacctctagaatccccccggtagctctcacactaaacgtgtgcatgagtgtcaaatgatgtgactcgggtggggactaggtagagagatcaccactccgcgatgacctcttattggagcgttccttcaagccccaaagattcctgataacatttgtcagaattccagagcatggacgattggagagctttgaggctatgtcactcgtcattcgcaaaaacttacccagagctccgccgcagtcatgtcctccggaagtacctcagagcattggtcccagagatcgcgacagatccgacggcgcaggttggcatgtcgttgccaatatttccattctttttcgagtttttctcttttttctggtgatatttgaacggggtcgccctcgtgacgacttgccaagcgagcttggatcgtcgattcctcgctctcaagacggctgatgtcctgccggagttcggatattcggggctttgcgtgcagggctgctaacgctgctcgggccttcttttcgtttgcctgtacagttgaaatctcgtcttcgagcctttcaatatcacgctggagagctgcagctatctctggggttgtgatatccgagggatcttgcagagcatggtaaactgtctgtttgcctatacgtcacttggttagtatgtctttctgttcaagtatgtcagacttaccagaagctctcccttcgatctcgttcttctcgtgcaagtcccgaagaagctttgcggcttgcgctagaagcccatatattaggaaagcatagacacggtcatagaaccagtcttacttttggtcaccttgttgtggagatttgcagagacatcaatggcctagaaaatgcttggtcaactctctgttcctcaggctgtcatgaagagagagcgaaccgagtatggacgactgagccaggcgatgttagtcactatctcgagtatcaaacaacttattggagctaacatacttttgttggcctgaaaatccacccggtaagtcattgtgagcaaacatctgtcaaggtccagattctgtccagatactcacgaaggtattctcggatcattgaagcatctttgcagtcaaggtcagcaggtcaacaaggatttgatcaagagaatttctcaccattatctgcagatgcatctgtcttgggcttacgtggagccatggtgtgatgattaggaagatgtttgagattgggaagatgtttgaatgtactgggttggtacgagttggagttcacaccggtggacctcacgtgtgtgaagtgactacagtgacactacaattcgaagactgaactttcaatgacaataaattcacagtaaattcacaactactcctaattcatgcccaaacttacaacccgaatgataatatgtccagggaaaagaaacaaaaaagcttaaggcagatatgaaatgggtgcaaatgcagtcatgtggaaacaagaagccattgagaccattcgcctcccggacggcgaatactttttgaacccccgagattatagaaagtagagaaaatgcaagtggaagggagacagccaaacgtgcttggatagggaacagagcccggggtatcacatcacaatctgcaaaagtcagctttgagtcaagttcaatggctaaaaagtagggtttacatacgcaatcactgtctttcgccgcactaggaacacccatctcttcaaaggtcttgggtcccttgcttggtggcttggcgggcttcggctggggcgcggatgaagtcgacgatgcgactgagggggcgaccgagggcgcgatcgaggacgcgatcgagggcgtcggttgaggcgtggaggcacccgaaccgtgagaagatggccgagactccatacgtggaggaaacgagggcgaaccaggcggacgaggagataccagaccgggtgaggacattccggagtggccagcagtaggaggtctcataggcttgcgttcagccgagtcaagtcgaggtggtgggcgtcgcccacctggaggcggcattggtgcagaataaccaatatcgagacgaggagccccaccaggactgaccatgttactagcctgtgggcttgtaggtccaggaggagcgctgagaggtgctccagggacaggttggcggtagttcatgggcccgttaggtccataggacggattgtgagatctaggggggccttgggcaggtgggccaccatatcccgagggtgcattggttcgaagattgggaaggtttggattgacgccaaaagcagagcttgggcgattgtctgacagttgataactctgctggggctggggccggggacgagtagaggaaggacgatcggggtaaggagctccagatggtgggccgtcagacaaactcatcctcgagggatctggcatttggatattctctggggttgattccattgaattacctcgctgatgagcggtatatcgcgtcgacttgatgcgcgagactgcgattttctcatggtcctttctggacagagtctttgagcgcgagatactttcaatccgaccagatgcatccttgttaccactggcagcggccttggcgtaccaagagcgggcttcctttatatccactggtacaaagataccaacctcatagaagtaacccagagcaaattcggctgtcggaagaccactctgggccgcgcgttgagcatatgtaaatgctagctcgtcgttcttctcaaaaataccctcatgtccacacaggaaccatttgctgattgccatctcggcttcgggctcaccctgacgggctgccagtgcattgtagtgcagagacagcgcggggttgaaatcacagcccagttgacaaagttcatatgcagcacccatcttgacctgggccttggcgaacccgtgatatgccgccttttcgatatttacacgtgccatgttcagatcgaggggtaggaagctttccgggacgctcacttgagggagctctcgagccaagagcatgccgtataccttttctccattagaatgatttcgaagatagaaatttttacaaaactcacgtatgcgccttgaggtgcgttctggtcgcatgactgcgccgccagccggatgtagtccaacccagtgttgaaatcctggtgctgtccatgctggcccaaaagaatcatcattcccaggcgctgaaagtatgttgttagtttttccactatgtccagtctatctgataacccacatagtatgaggcagaatccgcccgcgcaacaccccgctggtaatgtttgatcgccttctcaggctcacccgagctctcaaattgcattccgatgcggtactcggcacgcgcatatcccttctcagcggctcgggagtatgatcggaatgcctccttgcgatcgacggggcagccaaatttgccgaactcgagccacatgcccttgataaattccgctttggggtgacgctgctcggcaagaaagccgacaatgttcatcgcgtcgacccttagccgccgctccacctgtggggtctgcgggcgtggcggttgggtcagagagaggcggacatcgttctgcgcggcaacctcgacaaaggcgagggcatccaaggcccatgcgagttgcatctccgggtctgtggtcgacagcacggccatccgcgcgcgctctaggttcgcctctctctgttcatcggtaggcgggacgttaggtggtgggttccgcaaaaccgggaacggtgagaagtttgggtgatccatgctatcataggtcgcggattgcgcgtaggaattgggatcatgagcttcatcgtgtggggattggacggcggacgaggtgcgttcgggataggtgttggcgcgttggtatggcggttgttgttgcccgcggcgggggtcagcgcggtattccaactcagcgatattgtcctgcatgttctcgggcacttctggcatcactctagggtgaattagtactcgtattttcggcattctcggcatttgcaggatttgcaaagatcgcagagatgacagtgatgacagaaatcgcggaaatcgcagatagatgtgaattcaaattgatacctttgaggagatggggatatgacctctggcatgtagaagtcatcttgcccccctggataccatgttgcacctaggtgctgctgaccaccctgtggtggtctgttcattgtgaaattgttagagaattgtccgatcccccttgtcaatagtaaaggtcgaatagtgtcaagagagagggggaaatgaaaagaggagttgaaagtgatttaagggaaaaaggtagacccccacccccgccaggtcaaacggatttgaagaagagttattattagtatattgatagtagtattggtagtattaataggatatatccttctacttctagtaatataatagcgccgacctgtataagctccattatgtacatattgtattcttcagcctcatcgatggatgaggtacataactgtaccggcggacgtagggacttccatctggtggggctctcttgggggccgctttaaggcggatgtaagctgactaagtcgggttcacctccgaggttgggtaaatctcagtccggaggctgagcgctaagccacgtgatatatcagtgaggctgatgaatcaacatagccccacagtgtctattttggtaagaatgatttttgatgagcagagtaatccagagactttctcagcaggaagagcttgttaatgatgtcaagggttgaaggatggaggcttggagtttcataatgttaatgtgtctatagaatcataactatatcacatctcatgagccttatgtatcacaccaaactcatatcccattacagtgaatccgacatctcattcttgataaccacagcactcttctcacagggctttgggtattgatcggacgctgcttccaacccctcaagcatcactgggtctgtgtgatccaatttaggatcctcaaaaagagcggcgagctcaacttcggttttacctttcgtttctgggaacacgaaatatatgatcaaagtcttgaaaaattagtactcgagatatggaaataatggtagttgaaatttcactcacgccgaggacaagcattcccaggtagaaaatatagtagtaatatccaatgctctccagtgcaatgggattaacatattgattgacggtaagtgctgcctgcgagatagccacttgaatacttaaacccttggctcgaattgcaaacggcagaagctccgtcggatagcaataaagaagtgggttatttgccagattaaaggccgcatcgtagaaaaaaagaaatacaacgacggcaaacgaggctcccttggatccatgttgggcatacatggccgagcatatagtcaatgggatgttgacgaggatcatgccgatgaatgagatcagccagagagttcgtctgccgattcggtccgctagtaaagcccctgctagggagaacagcaggttccatatctgcaatccaccgttgataccggtttgctgaggtgtagaggtgataccaatgctggtcaagatggggctgaagtagtatgcgattactccctggccgttccagagtgtcaagagggcaacagtagccaccagggcaattcgtttcctgtttgccggcgactggtagagaatacgccagctactttgaccactcttttgggcggccgcttcagcctccaacaaggtatgtatctcttccatctcatgtatcacaagaggcgagtgcatgttgccgttgctatgatactttgcaagcagtcgttgggcttcttccgggcggtgttttgcacaaagccatcgcggactttcggggagaccgcaaagaacggacatcatgacgagaagtgcgggaattccttgaatgagcgacggtatacgccatgaccagctggtagtcatatatcctgtgccaaacgttgtccatgccgcgatgatggagcctacgtaccaaagtacattgaactatagaagtctcaggtcagcagaatgtataaagagcttggatatattagtaaggggaccttaccaaagaagatattgtgccacgcgtcgccggatgagccagttcgaagagcagcgaggggccagcaacacatgtgaagctaattccaacgccaatcaaaaaccgaccaccaataaacataccagctgattgtgcagctgtttgaattacagttcccgaaaacgtcaggcttgctccaacaaacatggctactcgtcgtccgaggtagtctgctgtgggcgaggcaatcagagcaccaacaaagcccccaacgaaaacaatagttgttatgagtccgattctagatgagtccggatttcccatatctggtgagagctgcatgattagcttctatctcgaagggaatgtagaaaggatctacggacctttgacccagggcttcatggactggaaacttcccaccacactttcatcataaccagtggtcatttgcgatataagaatggtagcctgccatgctagtagcttgcgcataccaagatctttccaccatttgtcaaagcgatgagtttcgatttcatgaacgggggcagtcattttgggaggatgaggttgatctctggggttaacacagaggagggcatctgggagagccaaggagcccattgaacttatattttgccatgatcaatggtatctgagagtgcaagcagatagttcattgaccgttgtagatatcgatgttggtcaactcgcgcgaaactcgcgcgagtttcttatctgcggaggcgcggcagtttccgccacccactccgagggacatttccggatacaattagggcttaaataaagacgcaacataccgaagtctgctttcaagatgctttcaaggcgcttttaccaatcattgacattcccgaccgctcgatcctgtacctagtttcccacccataccatgccccatccaacgactaatcaagtcaccgtggacgattccagagttcatggagactggcgagacgaattgttccaaaatgggtacgttgtggtgaaaaacgctatctcacctgatcgatgtgaatactacatcgacaagatgtttgagtggttggaaagtttccctttcgggtttgacaggaacgatcgctcaacttggaccgaacagcatttacccacgcatatcaagggcggaatgtatcatggataccgtatccagcatgagaagtttatatgggaggctcgaacgtaagtcttcaattccatatccgacgatacacagctaatcgatttgaccagagaggacggagtaatcgaagccttcgcaaagctatggggaacagacaagcttctggtctctttcgatggagtgaacttcactcttccatctggtactactctgccacaaactaaaccttggccacacattgatcaaagcccactgcgacagggtatgcagtgtgtccagggtgttctcaacttcgcaccaaatggtcctcaagatgggggtcttctcgtcgtgaagggatctacaaagcttatgccggagtttttcaagactcactcgggtgaaattggcagagaaacatggggacctagcgattggtttggctttgacgagagtgaggtgaagtggttcgaggaaagaggctgcgagattcttaaggtgaatgctgaagccggagatcttattctttgggactctcgcactatgcacttcaattgcgtcccatcatctcagaatctacgtgccgttgtttgtgagttctcttctccgacccaagtggtctctctctgactgttcatagatgcgtgctatacaccagcatcctttgcaacgcctgatgtcttgcagaaaaagagtgaattcttcgaccagcgaattggaacggtaagttatcctttctcctgtctcttctgcataaaagggcagtttattaacttcttgaatagacacattggccccatgacaatctattcactgaaactagccacgcaaaccgcccagaagaggacgaaggggacttgaccaagcgtctttatgaggaacctgttgagacggacttggtgttaaagctggcagggaaaaagccttactagatgtttttagattacttgctcgcccatggctcatatcttccagatccagatagttacattcttcctgattcctctcaatcgatcaagtattttgacatggagccgaattttcttccatatcactagtctccttcatatgtgggtataagagaagagaaaagcgacgtaataagaattttcaaatcccctctagaatgcgaagcacccgaaaacgaacaaatccaaagcacacttagcccatcatacctatattattactcgtacaataactaatatctcgctaaatgacttccagcgaaggtctcgataaggataatctcggggtattcaaggtggggatgattagaccaatcagatcaagtcccccaaagggtcatagataaagaccgccaaggctgcatttgtgtcttccacatatcctcaatgacagcaagaaagagccaaagggcacccaatgcttgctctagttgtgctaaacgtcgggtgaggtgcgacaagcaggtcccatgtggaacttgtcttgcaagaggcctagaaactacgtgtgcaagagaagttgtcaacgtcaaaggccgagttaccaggtgagtcaagcaatccagtatataactagtgctaaaacagagacagtgcaaagcagagggtgccggttctatcttattttgaactccaacaagaaaacaatcgactaaaagctgagctattcaaatcaaaactacttacacagcggaaatcgacgtcttctacatatcctagacaggaaatttccgctgaagtgctcgaaaaccagacgaatctgcaacatggaaaaagcgattatcatcagcaggtgtggaatcgaacagacatctggatgccaagcaaagactgcagtgatattttattgcatcacggctttacctggacctcgtggatccattttgctgttcatctgcagacattcgagctagagcatgagtctgcttggataaccggggtattccttgatggcgatcctctctggctagctatatattttggcttcgtagcagtgagcaatatttcctgtttttcttttattgtcgaggaacctaattgatcatagatgagtctgatgtttatggataaggatgaagctagaagagccggactacctctaggtttggctacccacgcgttttcccagtcaagttaagactcctctagtctaatgcatcctagaaaatacgtctgaacttgttcagaattggtacggcgcggcactatttttcctcaacgaggcggagtttctacgaaatccgaatttcaagacagtacagtccattgccatacttctcggattggccaaaaatgttggggactttgatcttcaaccagttcttcaggcgacaggaataaggataggccagattctaggaatggatcaggagcctcccatgatatccgacgaccctgttatgcaagagatcagtcgacgagtttggtggaccttggtcatctgtgaatggctgtccataccagcgcgtccgccttgcatccaccaagcagacttcaatgtcaggctgcctctggtcctctctgatgaagagttgacgacgagattgatcaatgagccgaatatggcaaccaaaatgccacgtccagtggattatcacaatgctatgatctttttagcaaagtcgaactatcactttcaaatccaaatgagggctatcgaaaatctggatggagataatcttctggaagaccttgttctgacaacggatgaagcgctagccaatatcatctcacagttgccatctcatcttctcgagatctccggaggactagccaaagagagagaacaatatccaccctgggtactgtggcaacaaaccacattatctctctcatttttgttctatcgaatgaaggtcaaccgagtcctacaacatcgatgggcctcctcttcggatgtccttcttgcaaggtcaaaagcaatctgcttagactcggccaacacgattgtgtcgatggtcaagcaacacaaagttgtcttggcacgccatcgtccatggtgagtctcaattcttcttctgcttttctgggtcctgttcactaaatattccacttcttcctccttatgatagggcaacaacctctgccctgttttccgctgccttgacccttgcagcagaggcaaagcgtcttgactcaaatgcagcagaggagtacattgacagagttcaaacttgtttttcattttttgagtatatcaaagatcacagcgctcttgcaacgcgagtcctaagtgaattgcgggtgttttgttttcatgattctgagtcaactagtgtctagtgattacagtgatattatggatcccattgcattgaaatttataaccagagagtgatgcagtcgattctttctagatggaagactcaactatatatatgtttagagtcatttcttatcggtacgtctttggctagtaatatcaaaggtgtaaatgctttaggtccttgggtaatgggtgatatgagcgaatgggaaatcgatccgatcagcatagctcatacgtgcctctgccagctttgataaagcagacgttgcatgtgacgagactagcgtgtcacattccatggaaccttagaaccttagaatatggaaaccttggctcggcttaaactcaatgggcgaatcagggcgttcagatgataattagtgggtcagaaaggggcatgcccagttgtacccagtactacggagtactcagtaagacaaaagcggcaaggcctgaaatccggtacctgcgtacaatacttccaaggctggtctctcagatttccaagatgtacctaacctcctccgtaccggtaattttaccttcaccgttttatttttatcttttccctttcctttggctattctcccgaggtcccttctaagttcttactggctgtcatctccaatggatttccaccatccctataagccatacgatatccaactacagtttatgcaggccttgtatgcctgcctggaagatagcaaggtcgctgtctttgaatcccccactggtaagctagacctcactgtgtttattgttgattgatctaacataatgttatgcaggcactggaaaatctttaagcttaatctgtggctctttgacttggcttcgggatcacaagcgaaaggccttccaggaaagtgttgatgcaacatgtgggtcccattgtgaaagatatgactgcatagcatctatctgacattccaggcgatgacgatgagcccgagtggatgatagaacatgccaaacgggaatctaggcgtgccattaccgaaaagagacaagaactcgaagcccgactggccaagattaggcaagaggaaggacgtttgaaacaggcccaggacagtgcagaccgaccccgtaaaaagcaggtatgcatatattcaccgattggtgcaaggtcactataccaactagaaaatagcgactggacgactcagcaccggaacttgtggacgatgacgaccaatttgttctcgatgactatgatagcgacacagacaatcagaaaaggcaaaatgactctgggaattccgacggcctgtctgcaagcactctagccttgttagaacgctttcaagggaaattctcaacacaaaagaaagagaaagaggatgacggagatgatgagattaagatctttttttgctcaagaacacattctcagctgagccagtttgccggtgaattgcgacgagtcacctttccatctagtttacctagcgacctcgatccagagagcaaagatgacctttccaaactggaagagcgcgtgaaacacctgtcgctagggtccagaaagaatctgtgcatcaatcccaaagtccgggccttggagaacaacaccgcaattaacgagaagtgcttggatttacagcaagccggcgtagcagccgacaagaagtgcccctttattccctccaaggatgacgaggctctggctcttgagttcagggaccatgctttggcgactgtgaaggacatcgaagacattgcccaggttgggaaaaagctcggaatatgtccctactatgcatctcgtccagttatcaaacacagcgaggttagtttcacccgggaacagatagaacgtcgtctctaactcaaaattagatcgtcacacttccatatcccttgttgctgcaaagatcagcccgcgaagccctcaatctctccgtcaaaggtcatattgttatcatcgatgaagcccacaacctcatggatgcaatagctggcattcattcggtggctgtctccctaagtcaactgcagactgcaattgggcagctgacaacatacgcccgtaagttcaagaacagactaaaagggaagaatcggaactatgttgcgcaagtcatccgcctggtgagctcaattgcggagcatatgaagtcgatcacccagcaaaaaggaccactagaaggctcggttcaagcctcagatctcatggctggaaagggagttgaccaaatcaacccttataaactctctagatatttgcaagagagcaagctcgcccggaaagttgacggctatctcgaattttcgcaacagccaaaacctggtcgatccaaagataaaacaacaatgccggttttatttcatattcaaagctttcttcttcctcttatgaacccctcggaagagggacggcctttctttttaaannnnnnnnnnnnnnnnnnnnnnnnnnnnnnnnnnnnnnnnnnnnnnnnnnnnnnnnnnnnnnnnnnnnnnnnnnnnnnnnnnnnnnnnnntcttccttttaggacccccggggaagggggacggcttttctttcagaaaagtcaagacgatgttttgttgaaatacatgcttcttgacccgacaaaccactttcgggaaattaccgaagatgctagggccgtcattttagctggtggtaccatgtctccggtgagtatagctcatatattctaacattgtagttttctaatgctctcaacagatgtcagattatgtgactcatttgttttcatatttacccccagaacgactggggacattcagctatggccacgtcattccaaaatccaatttagtcgcgcagtcattggctcaagggctgatgggaaacgaatttgattttacttatgaggcacggaattctgaaagaatggtatgtgcaaatttctgtacttggaaaaagtttcttattgacatataaactagatcaccgatcttgggcgtacgatagcaaccctctgtcaagtcattccggacggtgtcgtcgcgttttttcccagttatgactatctcagttatgttctgagtgtttggaagaagcccattcccaacgggaacggccaaagcactctcaatctactggaacggaagaagaaggttatgtacgactcacgcgaagcagtgacatctacagatgatttactgagggagtacactgaggccgttgagtcgggatccggggctttacttctctctatcgtgggcggcaagttgtcagaaggcattaatttctccgacaagctagggcgcggcgtctttatcatcggcctaccatttcccaatatccgcagcgctgtctggcaggccaaaatccagtacctcgaggaaaagacctacaaacaggcttctgggtccgagtcggaaaggaaagcaacgggcaaggcagcgggcagggaattctacgagaattcgtgcatgcgagcagtgaaccagtgcattggtcgagccatcaggcatgtaaacgactacgctgctattatcatgattgaccgccggtatgagtcgccgcggatccagcaaaaactgcctggttggattagaggaagcttggtcccagcacctcccacgcgggcggctcaaatgactgtgcaaagactttcaaaattcttcaccgaaaaaaggcgatagtggaatatgcactgtaatcgaatcattacaaataatgatacagcatcataatcttcgcatcaaatccgtgctcgtattggagatgtgccgtaaccctacattgtaaaagaccggcagaatgagaaggcggtgtatgtaatccgtgacataagttctgacaaagccagggctagggttccacgatcacgggacaagcgaatttgttagcgcacactctaagcctggatttcaacatcctgtagacggaacgatcccttcaacgccaaacatcaacggtcttgtcgaaacacccccgccgacaagatgcctacccgtttctctaacacccggaagcagtgagtcgacaccctttcctgtgccgtctgaatcgaattcttttctcgtcgatcgcgaccagaagaaccaaattcgtcataccccagtcgcaatatcacatcaacatatcactaacctgtctttctctcgcagccgcggccatgtgtctgccggttacggtcgtgtcggcaagcaccgcaagtcccccggtggtcgcggtatggccggtggtcaacaccaccaccgtaccaacatcgacaagttccaccctggttacttcggtaaggttggtatgcgttacttccacaagaccaaccagcaattctggaagcccactatcaacgtcgataaggtacgttacatctacattttgcgagtctattcgagatgaaggagaagaagttgtggattggtctggagttggagcaccggtgcgcaaatggcgacaatatgcagaagagaaaggaggccaatcgacaactattcgaaggatttgcggaattcgattgaaatggacaattatcgctgaccgcgactttcttctacagctctggtccctcgttcccgccgagcagcgtgacgcctacctgagcggccagaagaccgatgtcgcccccgtcatcgacctcctgcccctcggctactccaaggttcttggaaagggccgtctcccccagatccccgtcgtcgtccgtgcccgctacgtcagccgtgacgccgaggagaagatcaaggccgccggtggtgttgttgagctcgtcgcataagcgttgattcgtcgagatatttctggagaaggcgggtgaataggggcaatttgaagccctagctgtgttcgttcgccagcatggaggacgatcggaactcaaaatgagatctgcccgaaccgaaactaagtcggttcaagcggtcgaaaataaaaagggtttttttgtatgcaatcagcatagcatatggcctccgaatgcccttacgatttcatcagtgtgttaaacaaataccataaggaggatttttttcaaatgtttatgatgactcccgggcagagtgttggttctgaattattgcgccacgctcatgtaggatgaccgaggctgtcttggggcatgaaaggcttcgaatcccgaacaggttcgctgttaaagctccatcgtcgtagatttgtctaccaatctgtccgattacaattgcagaacctacgccagtgacaggtcatgtctattcacatctgatctcattctatgttgtatacatcgaggtattcaccatggcctagtgctctcagatcttcgactctcgcaccgaacctcgtcgacccccctgatcgggacccacggccaacgtctcactgataaaccgaacagcctcgtcagccatcttagcagtgacctcatgggctgccgattcgtcaatgatatcttcaaagtgcaccccgccatcaccgaaccacccatcggatgagatactctgcttgagccagttgaggaacagttctccacggtgatagggaacaagcttgtccttggcgccagacagattcaaaatacgcttgccagccaaggcatgagtcaaaatcggccgcagcaccttctgctcgctctctgaaggctgaggcaacggaccttcgcgcaaaggaccagtcaatggcccgcaatccacatgcttcagcatcatactggcaggatcatatcggctgacggtctctaggaaagaagtcggcaaggcttccgagccaaggacgtcggcgccaggtggatcactcttagtccatgatggcagcttcgacagccgtgcgcggtctgccatcagattgatatagtccgggcagccgatgatgacaactccggcggtgactcgaggctcgtgcagtagacagctccatgctgcgtgtcctcccagcgagactcctagaactagattctgggtgatcttgtgctcgccgctggggaatatgtaggagggaaggtagtccatgagcactgatgtatctcttgcagtgccctctagttataattagaataccatattcttattttacacatgcattcactcacggaagatggagaacatatcctgggcatgtctggggttcccctttttccaagattcatttccgagagggtcgaccagccgggtaccatggtttctctggtcgaacgagacggcaatcaggcccttggccgtaggggtgtcctggtttctcgtgttccagtcggtaatggcggaattggcaatgctagtcatgcgctcttgggtggctaatctggggtgaagaagccagagacatgcgacctccgaggcctctttgcggagctcttccagtccgaagaccgttactgagataccagcaattgtatagaccctttcagagatggcggctgccacgctgcctacatcactcacggatttcaatggatcagtcattgttgaacagagatatgaaagatgttgaagagaggtgggctgaatagcggggagataactcgggtatactacgaaaagccgaggccgttggtttagagcgcatgtttccgagactacgaggatttgttatgttttagatgttttctagttatgttgtctattgcctatacctcgtctcctttattgcaagttgatcctctcctttttgtatatttgattccacagtgttactccaaggtccccaactaaagccacatatacggccacttttgtttgctattaaaggacaaacccctttgaattcagtcagtctaattcaatattcccattttatacgcttcatatgtcctattatataccaaatactccatatatactgttgtagagcccatgtccgttgatcataacacgcctcgacgtccaatgccccttttccagaccgcccactcttctccagtcggagagacagctgggcactccactgtaaaccaattatcgatgctcctttaaatgtcaacacacgttctttatcctggaatttcttgtttatttcttgttcttttaatatgatgactacctagtcagtttcgacagtgtatgtacgtgaacgtggtagaatccctgtgaactgcaactgataatcgccttgcattagctccaatcatgtcggcctcgtcagttcacaaggacgtggaaactggctcactgaggatcgacacaaagaagcaagagccccctttggcttcaaacaaatcaaaactggcaagcccgctgccttctcccaccgaatccaagaaaccagcatcgatcaagcaggtccaacccacgacggacggccatgaaacagatgcaacaataggcgacaaggaaaatacacatccatcatccttgaaccagggctcaccaagaggaaggccatccctgggcactcaaccgccaaaccagtcagctgaggaccaacaatggcgctatcaacgccagtcgtctaaacccagaatgtctcctccatcccgtcccccaagtgtacatttcagagatacagacaccgaggctcctgacgcgtcccattcccggccgccatcgcgacccgtctctcgaccagcctcccaacacggcgacgatgatgagcagggtcccaaaggaaaacagtcgttgttcggcaaactcaagtcactcgctaatgcacccaaccttgcaccacactcacgatctgccagcggcgcgagtacggacttccgcccaggtccaagcgatatagctaccccggggtcggaaaggggagaattccgcttcccagaggccctggaagaagagggtagcgagatcgatgccgacgcggaagagagtggtggcgagcaacccgatcctcgtgaaaagagaaaactgcaacgccggcgaaagcaacgggaggaagaggctggccccaacaccgcccctacaacacctaaaacagcgcgcagaccatcattccacttctcatcctccttcgctcctttcgagaattatcgtactaatctgttccctcgaagagcaagcactacagacttcacgcctcaacaacgcgaaggtgtttcggaagatgaaggtcgtcaaaggctcagccgacggatgaggagtcgcccatgggcaaatactcgggttggcagctataatgaccacccagataccaatccggatgaacaacgcccgagcaacttgaggcgatttaccgggcttgctggaccatctggaaacgatgaaagcctaacggcgagctggagacgccatcgagccgagcgaggcaccagtgccagtgctcaacgatggaaacaaatcaaagcaggtctgaaacttattgggcagcgacgaaagccagagaatacagtggacaataaaaaatccgcagagttacttgctgaactcgcttcggccgtgcctgctgcgcttatactggccagcgcattccaacgagatgagcacggcagtagaaagatcccgattcttttggagcaattgaaggttcgtgttacggacagccggattgattcccactccggtgatcgtcatctggtcttccgaatcgaaatggagtatggaagtggcatgactcgcatgaaatggatcatcttccgcacgctaagagactttgccaatctgcatctcaagtataagcttcatctgggaactcagaagtacattcaactacgcacgagtgagaacagcccgagtctcccccgattccctagaagtgccttcccctacatgcgaggtgtgcgaggccttgaaagtgaatttgaggatgaagatgaagagggtggttatgagactggcgccgagggaatgagtggaacggagaggcctccgatgaagaaaaagcagaatcaacaagcacaccagcgtcgagtctctggtccgcttcctcgcagaaagtccagcctcaccaatcaagaaggagacacagccgcgggaccttcgtccactaacgaaggtgtctcgggagtcaggaaagaaacataccccgagaagcagcgaaagaagcttgagctctatctgcaaaagatgattaggttcctaatctttagggctgatagtaatcgcctgtgcaaatttttggaactgtccgctctcggtgtccggctggccgcagaaggcagttaccacggcaaagaaggattcttaataatccagtcctccaagggtctcgatttccgaaaggcgctcaccccggctctagtcaagaagcgccattcgcccaaatggtttttggtcaggcacagctatgtagtctgcgtggactcccccgaggagatgaatatttatgatgtcttcttggtggatgcctggttcaaggttcagacaccgaagcttagtcttcgcaagcaaaatccaagggatattgccaagtctgcaaagcagtctgcgagacaccctcagcaccacactctccggcttgagaactccgaacgcaagctcaaactgctggcccggaatgagcgtcaactccaacagtttgaagactcgatccgcttcatgagtgccaatactccgtggatgcagcccaaccgctttgacagtttcgcacctgtgcgacaaaactgctttgcacagtggctggttgatgcaagagatcacatgtgggttgtctcacgagcgatcaaccaggcaaaggatgtcatttatatccatgactggtggctgagtccagagctttatatgcgtcggcctgctgccatcagccagaaatggcgattggaccgtctcctgcaacagaaagctcgggagggcgtcaaagtcttcgtgatcatgtatcgtaatatcaactccgctatccccattgactcggagtattccaagttctctctccttgatctccaccccaacatcttcgttcagcgatcaccaaatcagttccgacaaaacactttcttctgggctcatcacgagaagctttgtcttattgaccacaccatcgcatttgttggaggtattgatctgtgctttgggcgatgggatactcctcaacatctgttgaccgatgacaagcctaccggctttgaaaccactgatggtcccaaagatgcagatcaatgtcaactctggccgggcaaggactactccaatcctagaattcaagatttctatgacctggataagccgtatgaggagatgtatgatcgcaatgttgtaccccggatgccgtggcatgacatttctatgcatgtcgtgggccagcctgctcgagatcttactcgtcatttcgtgcaacgctggaattacattcttcgccagcgaaagcccacgcggccgacgcccttcctcttgccgccacccgatttcaatccagcagatttggaagccttgggtcttgatggaacttgcgaagtacaaattctccgttctagcagtatgtggtcgacaggaactcccgatgtcgttgagcacagcatcatgaacgcctatgtcaagttgattgaagaatccgagcatttcgtctacatcgagaatcagttcttcatcagcacctgtgagattgagggccgaaaaatcgagaaccttattggagatgccctagttgaacgtattgtccgagctgccaaaaatgaggaagcctggcgtgccgtcattgtcatcccactgatgccaggattccagaacaccgtggacagtgaaggtggaaccagtgttcgccttatcatgcagtgtcaataccgcagtatctgccgtggagagacatccatcttcggccgtcttcgtgctcttggaattgagccagaggattatatccaattctacagtctgcgaacttggggcaagattggaccgcaaaaggcactggtgaccgagcaactctatattcacgctaaatgcatggttgttgacgaccgtgctgctatcattggatcggcaaacatcaacgaacgatccatgttaggttcgcgtgattcagaggttgcctctgtagtgcgggataccgatatgatgatgtcgagcatgaatggcaagccataccttgttggtagattcccacatactttgcgtatgcgtctgatgagagaacatctcggaattgacgtcgacgaactcatggaacatgactttgctactgaagaagagctacggaagatccaggtcgctgaggggagtgagcacccagttgacaaccaagaacgaagaaattcggcgtcctcggccgtcgaacgacaagatgagagggatatggtcgaacgtcggcatcgtgtccaggatgagtttctttctcgctccgaggaaatgtatagcttcaaccacgatgtagattgggagcagggttgtaaccctaacctcaaatcgaaccgcaagctcactgccgaccctcgcgtcactgaaaatcctgatcacagaaaagacgtggaaggggatggcgccgatcatctgtcagctgctgctcaggctggattaacagtcggtcgtgattcggagatggagcccaatggaagagaagccctgctttcagccatcgctcctgaggggaagggcactgttgagcgaccgagatcatcgcagcaaaagccaccttcaacaccctccaccccgaaggaccgcagacctgggtcatcgagtgagaccaatccaatccccgagaccaatgcgactacaccgtcacaaggctatggacttaatggagcgtcgagccgcgagtccgagactagcggtaccggttcgaacacggctaaagaagaaaatgaacactccaaacaccaccatccgtctgttccggatcccaagcgtatcttcatcgacaacgactgcatgagggacccgatcatcgatggcttctacctggacacatggcaagctgtggccgagaagaacactaaaatttaccgatctgttttccgctgcatgcccgatagcgaggtgaagaactggaaggaatacaaggagtatgccacctatggcgagcgctttgcagagatgcagagccaacagggcaacaagccagcccaacctcaacaacctcaacaaaaacaaaatggctcttctccagccggtcctacggttagctctccgatgtcgatcgcttctcagatgtctttcatcactccaaaggccgaaggatcgcaggcagacccgaagagcccccagacaattaacgagaaggtcgtaactgggaatgacgctggtcgtccacagtctgagcagttagcgaagcaggagacgttatcatctatcgatgagaaggccgcactcaagacggtttcggatccgaacctgttggccagtgttccgaacgggaacgggaccagcgacgacaatagtttcgtcgtcggtgatgatatcgagaaggcacgaacaacctcgcctcatgtcgattactctgaagccgtgaacctgaatctgaactcgagccattctcggagacgaagacgcagagctacaacaattggctcaaagcgtgacccccatggcacagatgagtatttggacaagggccgtgcagaggacctccttaaccatactcaaggccatctcatcatgtggccttatgactggtatgtctcaacaacgcttccattggatctcaggatatccactgaccaattctatttacaggctcgagaaagaggagcaaggtggaaactggctctatgctttggatcagatttctcctctggagatctagtaagttgtctctccttgttgctttccgaacggaatattaacggatatatagcaactaatctctaattgcacttgacggcgtcttgttcgtgcttgtctacttggtgtctgtgttggaattcgcgagcgccgctatagcgattgatgcattttcatcttcttgggccttcttgggtctttgcctagtcatccttcggagttttcatgcatcacggcgttctctatgttacccctacctaagtagcgcaataagtaatcatcccgtttcgaatacggagatagtatattatcccgccaaggtcctgtgtggtgtgtaatagacgtactatttcaacggttactgatgaaacggcttgtactttagtagaataatgctaaacagcagaagaaaattgaattcatgattatatatctatgaagaagtaggctcttccgcaacgtagtgcaggtaagctcccagcagcttggttccctcaatgtagtttctcttgtcaagcttctcgttgacagagtgggcagcatcggtcgagcttcccatggggagaagcaaaacgttcttgccggtagcttgctcgaaggtcaatgtgacagggatactatcaatggttagctgcgggactatttcatttatgggaaaagaagaatctcaccttccaccctcgcgagtcatatcaggctcgactccgaagacctgctgaacagccttgctggcagccgagaagttccagtgcttggggctggcgacccaccacttgccgtcgtgctgcagccaaacatccaaagtgttcttggtgttcagcttggcgaactcggccttcacatagtcgatgaccagcttggtcacatcttcgctctccatattgggcacggtacgaatagagaatttaccaatcaccttggcaggaatgacggtcttagcaccgggggccgagtaagcaccctcgataccgtggatggacagagagggataacgccatctggccatcagggtacgctccttggtggggtggatacctgtctcagcacccaacgactcgtggaggttgtccatagtgtagctgatctttccatagagagtcttctcctcctcagtcaagggagccaccagatccatgatacccggaatcaagatgttaccctgggcatcaaccagcttggacagaacgttgaccagatcagtcatgggctcgtgggcagaaccgccaaagacaccgctgtgcagatcttgagcggggcccgaaatgctgatggagtagtagttgcagccacgcagaccataggtgagacagggcttctcggtgccgagccagtagttgtcagagatacaaacggcatccgtgtccttgaagtacttcttactctcgtccttgatgaagtcatccaggccctcggatccatactcctccattccctcgaagcagcacagcaagttgacggggaattcgatgccagccttgcggtgggcatcgatgacgttaagccaacccaaaacgggacccttgtcatcggtagagccacggccgtacatccgatccttctcgtcaatagtcaactcaaagggctcggtagcccagccgtcttccttcagagccggttgcacatcgtagtgtccgtagaccagaatagttcgcttgttcttatcgttaccgtatctcgcaaccaccacgggtggcagctcgaggtgctctttgccaggctgcttgcccaatggtcgttgctcaacctcggctccaagagctgtgagctcatcggcaaggaattgacccatctagaaaagattagaccctggatttggatgtctgctgggaaactcacgcggaacacatccggtcggttctcatcttgcgccgagatcgatgggatcgcaaccgccttccgtagaccttgaccaaaaatcagcgaggaccttgcgagaaaccagtattacctacgatcgatgaaatcgttggacgaggcgtcgacccttgtgactgttagttgacgtctctctttcaaagattagcatacttactgcttgaaaaagggctctagctggggagccattttggaatcactgatatagccgtagaagaagcggcgagaggagagaggcgaacgaacagctggagaaaatcgagaagaaaaaggagcgagtttgaatgaaacgcgacggaggggaaagaggggcattgccgtctttgccctttggtaaccggagagagtctagaggtgacttcttatcacgtaattttctattggccctatcacagcgatgtggtcagcggacgggttctaggcgactgagacatggactttggcatattttaggcaaaagatacagtcgagacattagaattcccccgttgatccttatttctatatagctcttgataaagtagaagatttggtatggaatacataaacaatgctacaaataagctagaatacatggatttttctttacaaagccacccccccccccgaagtatcatgctgccactatgcatctcgtccccaggcctcgcgccgcagttgacggtcctctctggccatgcggcgcttgggtccccatcgcgattgcacggcctccaagatccgggcctggatctctctcttctctgggcttgcctggcaaaccatggcaataaaaacgggcgagcattcaaaccgtttggcaagcttgtttcggctccaggtcatgggatcgttcatgcggagtttgcggatttcttcaatatccgaaggggtgaggtggtatttcctttcgggcacggacttgtagacaccgggaagatcgtcggcattgggggtcgcagtggaagagaggattgatgctttccgaacatcatcggctggcaggaatttggatggggtgtggtaggcatttggagcactcgatggcgggttgtggataatgtgatcgtgacccaggttagacgggtcaaatgaggagtctggcttcacacgtagtcgctgcttggttcgtcggtatgaagattggtttcgtcggaagcctaaagccagcgaatccgacaaggagggaataaggaatggcaatgtgagaaatggccgcttcgtcgcggcaatgaaggtcgccattgcttctggtcaatgggggggattgatcagaaactaaaatgatggaagagaaggggttagtaagtctgcatagatagtggttgcaatgattcaaccaacctaaacggaagagtgaatttgggggtggaaggactggacgtgttggcgtctcttgcgctcgaacccgaacttttcccctggtctcgtgaccctgatctgggtgtatttgcaataccgtattgaaatatacgtatgtatccggtacctgataggcctttgttgtgagtgcctttccaaagtaccgaatacaacttatctccgtccttacgtactgccccaagtaggtaataatcctccccgtttgggcccgttggggcttgtcacctggtctactccagttacgatgtctcacagatgtcatcaagacttttgctaactcccatatacccatatactctactttattgattatgtccagattttgttagttcatcttatcgaaatgtcggatatcgaaatgtcgagatttgcagcccagacagagaagccaaacgaggctgaagcgagtacacgagcgaagcccactgctctcacatgggacaatcaaagcgacaaaggttgcatatcgcctgtgaggtcattcgaaggcctgcgaacaccaaatcatgattcgcccaagtacatgcgacacccctcgtcgcctgaaagctcatcctatctgccgtctcgtatacattcccccgcctctcagatattcgaacgagacgtggaagatatagtgccagcgcaggcgtcgccttcgatccctacgcatattcgaaccgataactatattccaccggtcctagaagcatcctcggccgcgatcacagatgaccacctcgatccagattcggtcgagattgtcacacatagcctacatcagccagcaggtggtccatcgggagagcagtcaatgtcgtcttccagcattgatcatctcttgggccagctcgatggagatgaactcacgtccagttatggcgcactggacacggcggacgtacgtcggctgagctttatttcctttgccgacgttgtcaacgccgagcatgcagaaacaaatgaagctcatgctggcttaatatctcgggggcgcctagcagatttcaatcaatctccgtctccattgcgctctccatcttcttcgcgtggactcggcacttcgccgccaacaagccgtgcgacttccttcagagggcttgatatgtctcctactcggttccctacttctagtgttgcccaaagcccaatctcgtccagttttgggggcgacctcaatatagagaccatgcgacaggctttgagaaaaaccgctagtggagacctgggcgtcacaagccgggccgtgagtaccataggggatgacctgctggatcgtaccatttagcagattaaagtgcttttgtttggcgtttggacagtgaaaggctcggagcaggatctctttttttttcatggtacagtgtgataatctacggtctgctttatatgatatataccgcaatctacggatctggatattccagaacctgaaaagtccaagttcttgtgtaatgcacaggccaactttgattgaattggggtagactatacacttgcctgcccaactttttgcactgcgtccaaggcccgttgtacccgggcgcgcaggtcggctgcatcttctaatccaacactgattctcactagatccggatcgacatcgaaggttctcgcctgatgcatgttagtcatggcctggtcaacattcgcgtggtgtacttacccaatctaattcgccgtaatgggccaggaggacgtatggagagctgaaaagttagtaaaacccaagacagagggcttgcgtactcacctcaatgtaaaattggtcccaaggctgggtcccttgaaaacctcgatggtgtcaaaaaaggcaatcgcctcggctgtggtgtggaatgtcacagagaagagaccaccataaccaccattggcattgcggagactatcatatagtggtttcgaggggctgtatttcgggtagtaaacatctttcactgtgaaattgtcagtatagctctcactccaggtaaatgcatgcttacctaggggggactccttcagcatcgctgtaatgtcctcagtggtagcattgatctgttcaatgcgagcaataaaatcacggctgtttctctccaggaacacgacatcctcagcccagtagatatcttcgtagtcctggttatatgtctccttgatggccgcataatacggcgcttgagggttgagcacagcacttcctcccatgacgttgctatctccgctgaaaatcttggtcaagctgctgacaacgatgtcggccaagtgcaaaacgttgatgtttataaagttgctgatagtttcgtcgaccaccaccgcaaagccatattggtctgccaaagcgcgaatccgtttgaggtccggtgttttgagaagagggttacctggtacttcggtgaaaagcccaaggaaacgctcaccagccttcagtcgagattccagatcatccagatcttccgacgagccgtgaccatagaagacgcagcctggtccccacttttggagaatcttcaatgtatccgtgtaagggaacccgaaacaaattgagggcaattcgcctctagtagccagtaaggtctgatgagcgttgaagatagcgctcatacccgcagggtaaagatagacatcctcctcggagataccggcgactcggccttctgatgaagctgtctttaaggcttctggcagttcagcattggcagtcaagacacccgcaatacgtttgcgaacagccagcttggcctggttggcgagagaagtgctcagatttcggccaaaccgctcctcaataaactgaccatagtctcggccgccgtcttcggtgtttgattcgggaggagattctccaacagagccctttctccctttactgataccttggtatctgcggggtcccttacaaggacgctgggagactgactccgcagtcgcaaggcccttgtcttccaccaagaacccgtcctccaatgctccaaggcagaactcacctcgtcgactggagatgccattgcccgagtgttgccatacctgcttggtaatggaggcgtattcttttgggtaaatgacacacgacaaggaagatgtcactgtcgatccggattcggtatgcggggatgggacgaagttgacaatccgtactttgtatgcctgatctgcagggattttgctaagcaaaaaagagtgacagatgcgcgctgacttgactgaggcgaatagggttgcagattcgaggttggggtcaccgactcggcgaacaatctcctgcgcgagcttttgaataataggatggacgaagaatcggggataaccgcattgcatcttgtctatcacccaagcttctccttcttcgtagccgatgctttccctccatgatggaagcgatacactgacggccttgtaaatgttagaagagtcatggaggggttgcggggagttagccatacatggtcagtgtttggaggcacaggtcctcccaaagcctgcaacattttcaattgaaaatagaaaccaggtggaatttatgatctattgcagataattgctctagaataatagagagagggaaaaaaaaagactgtaaggtaaatgatgcgattcctccactcagcgacttcggcgatgctccggtacctgataaattacgagtgagtcagccgtacggtaactatttaccagatacaataccgttatcgccaaaaaaaaatctcgagggcctctactgacaactgctacgctcacgaaatgtcggaccacacatccaagcgcagaaagctcagtccttccccggagaatgctgttactagcgcttcgacgaaaaagacatcgaaagtgaccgagaagcgaaacccggctcgaggcaaagatgagcgctccgcagagcttgcaatggccagcggcttttacaagtccagtttcttcaagctgcaaatggacgagctgctggcgggattgagacctaactacagcaagcaagtctcaaaggttcaggatacactgcagcagatcaaaaccgctattgaaggcctgcccgaaaagtctccacaatctgtccccgatgccgagaaggagctacgtgcttctggtctggtggtcccatggcctgagcctcgaccgagcaaggatgtcaagtacagtatggcatacgcaaagccagcgaacatcaacgtggtaggtagctttgcgctgaagataggcgctcgcaatttggcgtcgcgcccaattgatctggcaatcactatgccaagttcgctcttccaggagaaggactatgtcaacttcagatacttccacaagcgggcctactatatcgcgtgtgtggccgctggggttcaagaaaccgcgaacaccctcgggtttgatatcaaatttggtcctcaggatggagacagtctccgacctattatcttgttggaaccacgtcaagccgaatcttccaggcctacaatccggattctgaccgcaatcgatcctacgttgttcccaatcacaaggacgctcccactcaaaagcaatatccgacaggcctccaataactcggagatcggcgaaccgacctcgtattacaatgccagcctccggtccgatgccacagtttctctctatcacaagtctgtttactcggcctccaagaagtgcgattctttcagcgacgcatgcattcttggccgcacttggctgcaacaaagaggcttccatacccccttccagaatggaggctttggtggtttcgaatggactgtactcctgtctttgctgtttgagggcggtggtccaactggacaaccggtcctgctaccatcatacagctgctatcaaattttcaaagccactattcagtttttggccggcagggatttaaccactcctctattcttcggccatgaggtcccagttccttccggagtacctgttgtctttgatggccgcagagggttgaacatactttacaaaatgacgccttggtcatacacaacactgcgtcacgaagccgccatcaccctaaaaatgctcaacgagtcacgagaggacaactttgataaggttttcattctcaaggttgacgagccagtcctcagatttgaccgcttgatctcattccccaagtcattcaatggagacacactccgcgctcttcacgaacagaatgctttgtataatgttctttcccgggctctgggagacagagtcaaacttgtctctattgtgggccacgccattgattcgtggtcggtcaaatccaagcagcccaaacggtcgagtcagggtgtgtccgtgggactgttgctgaacgccgaaaacgtcggacgaattgtcgaccacggccctgctgcagaagaaaaagaagagtctgcttccttccaggctttctggggtgaaaaatcggagcttcgacgattcaaggatggcagcatcctagagagtcttgtgtggtctgatgagtcggagacgtctatcatctatcagattttggagtatatcctccaacggcacttcaaaatcaccaccgatgaatttgcatttgttggtgatgaatatgacgagctcctcaaagagcatggcgatggcattctggcatactccagccctgctttccagtcaatcgacaatgccttcaaggatctcgagaaatccattcgcggtatggacgaggtgccactggaggtacgtcatttggccccggccagttcgcttcttcgttatacctccctcagaccaacgggacccacggacgttgttcttcagtttgaaagctcctcgcgttggcctgatgactttgctgctatccaaatgaccaaggttgcattccttttgaagattggagactctctggaatcttcaggtgcagcctcatcttgccgtgtgggcctcgaaaatgaatcgagcaaggtgatcaacaatgcttatttggaaattccccattcctctggtgtgttgttccgattgagaattcaccacgaacgtgaacaaatcctactcgagcgcaatctcaaggaccgaaatctgagtccccgggagcgagaagaggccgcctatgctctcttcgcctacaagaaaacctttgtccagactccgcgcttgacacaggcactccgaagcctctgcacgcgctttccactgttgtcgcccaccattcgtcttaccaaacaatggtttaattctcacctgttcactgcccaggtcagcgaagagttggttgaattgctggtaattcgcaccttcacccaacctaacccttgggaatgtccctcgtctgtcatgaccggattcctgagaactctccactccctctctcggtgggactggcagcaggagccgttcattgttgacctgggaggtgatctggccccacaagtgacggcaaatatccgcactcgcttcacagcttggcgcagcatcgaccctgcgatgaacactctggctcttttcgtcgcctctgacctcgacaccgaaggagtgacctggacccaatatgagatgccctccaaggttgtggctgctcgaatgtccagcctgaccaaagcagcagtaagcctgttacggagcaaaacccatgatatggaagtttccgagctttttgatacctcgcttgctccctatgactttgtcatccatcttcgcccaaagctgtttagccgttcctcgacacccaaattcaagaacttggccgaaccccgtgccggaatgatgcagaccatcaagtcgtttgtctgtgatgtgcaagcctgttacggccagagcattctgctcttccacggagacgatcgttgtgcagtgattgctggcctttggaacccgcagactctgaagtcgcgaacctggaatctgaagacggcgtactcaactgccccaggtgatactgagggtgaggttgtaatcaaccagactgctattctgaacgagatcgcgcggctgggcaatgggctcatcgaaaacattaaacttcattcagaataggtcttgtcttgattcaattggtgtacattaccctacaaaatagttcgagcatatgtagcattctaacgaattccgtttttcttcaacttatgaactcttagcctcgagtatcatagtagatgatcctctaaataccctaatactcttagtgctagacattcccagacatcatcttgatatcgatgcctaaggtgtcaacaattgataacattgtgcaaccatcagcctttcatcttctctcatcaacacaacaatggccaatataacacggggccagcgagcgctccacgctcaattaagatcgtggaatcactcttgtatccaccctcgcccccaattccagttgctgcccatccgcgcgcaatcccagctcttctcaacctcctccagtcagcaatctcgccgaccctccccgtcacctcctaccacaaccaccgtctcaactccctccaaatctgaaatcaatgccccaatcagcacccaccccgccacgctcacaaccccatcccccctaagcccctccgcaggcgcagcggacaaattaaaacgccttgtcggaatcggtcgtgcgtacctcaccttctacaaaacaggcctgaagaatgtctaccacaattaccgtgcctcgctccctctacggagaaaaataggtctacccgcctatatccctatatccccacacaacatccaccaccgtagcgcgccatcaataacagaagaatccaagctcggccgcgcgcagttccagctcgtccgccgctcagcccgcgatgtccgccgcatgatccccttcacgatgatcctgatcgtctgcggggaactcacgccgcttatcgttccgtttttcggctctgctattacgcccgcgacgtgtcgtgtgccctcgcaggtggagaaggagcgcggtgttgctacggtacgcaaactcgcggcgctagatgcgtttgttgcggagaataaggatcgctcggtgcatttgctcaaggcgggcagtgcggagcagttggctttgcttgctaagtgttttgcggatcctgtctgggtcgccggtgcgagctctgcggatgtgttgcgtgcttgtgctgtttttggtctggttaagcatcataataggactgcgggtgaggcgcttgctggtttgatctaccggcctcggctggcgaagcatgtcgagtacctggctaatgatgatgggatgattcgtggtggaggggtttcggctatgaatgctactgaggtgcggattgccgttgaggagcgtggtggtgtggacgtcacttctggtgttcaggaccggaaacgcgtggagttggagaggcgctggttggagcagtggctggctgttcgtggaaaaagtcccaaggccaagaagctgtagtttcttggactgatacactggaggtcctttctcgggggttttttgtaatatatatatccaacatttcgactcataaaagggctgtttttcgtccagctttgctatcattactagccgcaatactagctagcctcggagtgcaatctcaaactgtatataagaagacatgtacggaaggaaaatccaaatgtccaagcgctcaaaagtagcatgtgtcaatttcgacagtcaaataaatggaagggtatcaagaaaccagcctttctgatggagaaggcaatcaattgaaaaaaaaaaaccccaagtttatatactcaccatcagtccactgtaattgaagaagccgcagcctgcgcctgcgcctggctacggacttgcttcgcccaccgcagaccacagctattgcaaagatcccggtttccactcggaccacgccgccactcgggggtgttctttgtgttgcacatggcgcaaaacttctcgatcgcattagcgccttgcttgcgcttacgcttcctgcggcgagccagcagacgttgcagttcatcggccagagtgcggttctgcttctctagctcgcgcagctcgatttgccagctcgatccgcgcgtgggattgagctctgtaaagaaggttgctgggtcggtagagggagaaatgctgcggttgccactgggcagaccgttgaggccgatcaggttcgctagatcgggcatgcgttgaccaagggcaccgtactgctggggcggggtggggttatcgacggtaagtgttgtgttgcgtgcagtaccggtaagcgtagcgagactgttgtcttcggcggctgagatggcggtggcggatggaggagaggctcgagcgaatcgtatctgggcgacgaggaaggtcggttttatccccttcggtgtatcgccggtgtacaatgtggtatgtgctgaaagggcatggcctttcttatgccatattttgtgtttgaatgagggtggttcattcgtttccttgtcgctacctgtaacggtggataggccagctccttgtccaccacaggcagcctccagggcttgtgtgatcgtggcattgccaccagtctcaggctccataatctcttgtatgcctttaccaatcaaatcgtcaggcgagcggccgagcaccggcttcaccttggtagtaacgaacagaatcacaccagacaaagaaatcttggcccaaatgtcattctcggccagcgcggcggatgagcccaggcgggcaatctgatccaaggtgtagacgggtcgtgggcggccggtcatgacaaggtacctccggccctgattcggatcgatatgccaggcgccgtgactctcgaaccacatatatccttggtgcttttgtctgatacgatacacgacactcactggagcggttgtcgtgctccctcgcaagtcacgtattacaggaccaatatcactgggatggcagatggcggacagggtcttgccgatcagttcggccggatcgtactccagaatcttgtggcaagagggcgacagatacagaaattcaccgttgaatgaaagcacatggatcacatcatcggtattctcaaccagaatgcggtccaggtagtgccggttgacatcattgccagctgcacccatggcgttgaggatgttagtcacttcgtcatggccatatcgcaacacgaggtctggtcgtgaggagcgcgcatcttgtggtggaactatatactgtggcagatgatcgcgctggtagtttatggtataattaccatctatccaatgttagtgagggcactcgccacgaggaatgcaaagcataccaggattccttcccctcacagcatcgggtttttcaaccagatcgacctgaaacccgacataataccgataaacatccgagtcccactggatggggatcatcgtgatgagattcatgaagggttgtccacccttgcggtagttaattatactggcctggatctcattgcgatcgtcgatggttgaccgcagccgatagacggtctgtccatcgacaaaggtccgcttggcaccagagttgattatgccgtcgggtgcttggagaaatcgacagttccggccaacgatttcatctttagtatagccggtcagtcgttcaaaggcctctgatacatagacgattggatgatcctcgaccaagatgtcacacatcacaaaggcacatgagagatcgaccgcgccaatgttgattttagggttgggtcgcatagccacacggccctgaataaggttaatatatcgtcggatactctccatggagatggaagacttaccaacgctcccagcacgtcaaagccagtcgttgaataaatgccggtatgttcagtcttgccaatatcgggctttgctagccccggcgcgaaatcctctggttgcacggtcccacgtcagtcataccatgggacggagctaagagggagttaccagacacagacacaactcacctttagtaacaacgggtttcttgggctggatagccaccggttgcgatggacggtacggctggccaacaggcaggcggcgctctggaggttgtcgctgcgcccgctgcacctgcaccggcgcctgcgcctgtgaccagtcgctcgtgcgacccgagaagtcggagtcctcgaaatttgctgttgagtcggtgcttgtatcatatcgttccttgggcgctggccgagcgggctcggaatattggggtagcggcataggttgtgggaaaggcggatatgcagactgaaactgtgaatgatccatctgcggaggcaaccccatgatagccgggtacgtggctgggatatcgtaggaataggcattggtagcattcgtattcattggcattgaaatacccgaggtcggaatcccgtcgtatgtgagcatggcattagacctcggtccctccaggtccgacggctgtgagcgtgcgaagttctggagcgggagatccgcatcctgggatagcatggcactgaaggcataattattctgattggaaaaggttgtatatggcggattggtgggttgtgagggaacctgatgttcgtcatcatagtccaagttgaagctgttcatgttggttaaaatatctgtggcccagaccgagttccatcgccccgcaggatgacaccctgggcaaaagtgagaattgccgtcgaaatatgcttgaaaattgtttatcaaaaggaatgttcgatatattagagagatggaggaggaggagactggcgagagggtgtgtgtgtgagagagaagagaagagaacttgatatctccaatgatgtggagaagtactcgccaatcttgatatatggggatttgccatccaggatttgtaggtgttggatcttgtttatttatgtattctttctgtttatgtttctgtttctgtttctgtttctgtttctatttccctttcttgattctatatctgtatctatatatatgctaaattgtaggttgtaggttgtagaaaggtgtcctgtatgaagtgtatgccatgccatgcgcaaaccctcacaatgacaatggcaatggcaatggtagactggaagagttactatagtatatagtattagctacagtcaaagatagagagctcccagggctatattatgtagtatatatatagagctagtatatattgcccctattatataaataaacccctgtcaacattccccatttcccctcctcactctttctccaataatgtccattggccatggacaagatctcaatcaccatctgcggagatggtggatgtggtatgttgcttctcttgtctcctgggaatttcctgactccgtgattcggtgccatgtttccgggtttcgcgcgatcgagatctgatcaaatcgggatgcaggcaaatcttcaatcacgatgcggctggtccgtagtcaatgggttcacgagtaaggatatctccctggtcttggaaacctagtgctaatatttcattgctagatatgatccaacaatcggtattgcgccattcccacgcccttccaatgcccttccacttctaatcgggcccagaggattcctactccgtcactcgcaccgtcgacggtcgcccctacgtcctttccatcaccgatactgcaggccaggaggagtaccgggggctatggtctgcctcgaccctgagttcagatgccttcctcctagtttacgatatcaccaacccgtcgagtcttgaaacgctggatcatttcatggagatgattgatatggaggcggaacagcgcgtcgaggacaaccagcaactgcgccagaggttggggaatcgatatgggggtctcggccacgtaggcatgccaccgccggtcaaagtcatcgcgggcaacaaatgcgatctcaaggacggtcgcgcggtgacatcccgcgacggactggcctatgcgcgcaagcatggctgcgggtttatggagaccagcgctcgcgagacagtcaacatcgaggagacttttgcccgtatgacacacggtctgtcaaccaagaaggagagagagagagctaacggtcggatagatttaatccgtcgcgttgtcgaagcccgccgactccaatgtcaacagggtgttcttcctcccagcgaaccatcgcacacggcgctcccgaccagcacggtggacgcagttgcagagaccaaatcccgtcgaagtcgggcgtgggagtttatcaaacaccggaagacaacggaaccaaacggcgaacagggtcaggaacagagtgaaatgcaaaacggaaccgaaaaagagaaggggccgggtcaagggtgtgaaccggatgaacggtgcgctcgtcaggtgtggtgttttcgctgttgatttgaattgcggagcgaagcgaagcaattgaaacagcaacgtatccattatgtatagtacctggcatctgtgggcaatgtgtatatttctgtgtcgtagcattggatcttggatcttgtatcttgtatcttgtagaggaacatgtacataaagttcggggtgaatagggtcaaagggtcaacgggccaggtcaaggatgaatggactcggaatgcgtctccgacaatcaactacgggatatgatgctgaatagagggagctcccatggacaaattgaagtctgaatttgatagatgatttcatagggattagatttagatcgtcacatatttccaaaagcagtaagtatttagctaagctttgtgaacggaaacccagccgagaagaaaagaaataggaggaaaataggagacgccagcaatcgaaacaggatatcattctagaagcgaggcctagcccttgctcacgcccaacagggacatagttccttattgggcgatcctcggaatggtcacgtcatggactcgaagggccatcaccttgacggatgacaattggtgatagtctgagaggcctatcatgaatcatggagatgacctcaggattgaatagaatacacagtttacagtaaatggatagaatgcagtctcgaagctattcggcatgggcttgccgatttaatgtccgctgacataggcagtataaggattgcatagttatgcaaactgaggatattcaccatgtacatctgttcttctactcttctaccgatgttggagatgttgtattctatatgctttcgatattcgaattctctctattcgaattctctcgctctgaggattctaccattctcccattctctataataataatcaatatccactcctatacgtcagaaacacttcccaaatgccgagtcatcctgtatttttcccgtaacacccccgtaccgtcatttatgatcttcgatccgatcccttttttatgtccagcgagactcgagactccagtgactctaagaagaaaagccagagaatattatttttataaaaataataatccgaaacgagtagggcccctcttttcgtgattcctatatatgcacatcgacgcccatggtgacctgggatgttacttttctttaagagtctattacttcactcgagcatcttcctagatcactactctcctctctctattatttctttaaaccttcttatatccacggtccccagcatttctctctctgcatccgtctactctattggaactcaatttctcttaatctgtgaacatcattatatcattgacattttgacgtcgatcatcctccctctcgaagtatagctaaggctcggattcctgttcttctctctacactttcgaccacaaatcatggcagctcgacaatcaacacccacctccgagcactcgcattcggatagtaatgtccgtaaaagagtatgcaaagcttgcgatcggtgtcgtttaaagaaatccaaggtatgtacagctaaacgaatcaaccctcccaacatccactgaccctccggacagtgtgacggatccagtccttgttcccggtgtcgtgccgataatgccatctgcgtctttggagagcgcaagaaggcacatgacaaagtgtacccgaaggggtaagcgacatcaaacagtcctagctcgaaactcctcccactgaccagctctctccttctagttacgtcgagatgcttgaacagcaacaatcttggctggtccatggcctccaggaactctatcgacgcaacatcgaaggcgaaggctggcccggcgagcagctgaaactcgaacccaacggtcacccactcacccacgaccttctcatgcgcctcggcgccctcgacggctccaagggcgagcgcttcgaagaaaaccccgaagccttacagcaggatctgtggcacaccaacgccggcatgcaacgccaggaatcgtccgacggtggctccgatagcccccagtcaccagtgccccgttcacgcttctcctccgatgctttctcccagcaacacatgccgcccacaccgcccacatatagtcccacgacgcgtgcgcccatcaagaccgagcagccttctcaatctcagatgcccagcaccccgcaattcacgcaacctttgtccatgcaaggcgtcgtcaacccactggcgttgcaaagtccgcagcagtggcctagtagcgggttcaattctttcgacgagatggacttgatgtccacggccgattactccaatatgccctttgacgaccagcagttgtcgtcgccgatgttcaatcgccaggtgcccttgagctgtttgtcgcaagggtcatatctcgattccaaggactatgacgatttcaaccagttcctcaatccgaaccctacagagatcacctcgatctgagcccttcttctaagctattttgagctatcctgagctatcttgcgccatcttgagctcaccctgagccttatcctttcaaggatcgactattttaacgccgtatgacgtgatgcatgtatactatacatgttctgtttttctttctcttctcttctggggctattttcccccgcaagttctgttgatcggattcaggcgcaattgggatcctaatcacctctgtacagtgaaccggttttcggagatttggagttattcttcttctattctctttcttctcttttttacactttgtttcctttctttctggcgttctaaaacggggtttcaaggagtcgtccatttattgtctaattagaattcaatgaagtttttaaggtcatgtcaccgttacaccatccgaaacgggaaatgatctcattcgacttgatatccacttagcagttacccaggtaccgttccagatcgaaaagatctacagaagtagcggagggagatgccgatttgctctagccctggagccctggatccctccatccttgccttaatccctggagggtcatggagttcgaacatcaatggagcaaacggcaataactcggaccttgatttggtattttattttctttttcgtatttttgatttttaataagattattgatcttccagctgactcagcggcccattccccactttgagcgattttcggatcctttttggctgcttacgtcagccattggcctgcgagagcccgcgaaaagtcgccgaatcccgatttttgccgttccggggcaaatgctccgacgccaaaatataaaaaatcgggactttggcctttggagatgagcatgttcatccttatttgaccgtggaacttatgttataaccttctggccaagccgtctccctcgtatacaacctgttcagtcacgaagtatatttgaacggccgaacacataaggccgagttatcgccaaacctgctttcgcaagaaaatgcctctcaatcccatgccaatccaacctaataccaacctaacgccaacccaatgctaaaactctattatatcctggtacctgccaatattaatatcaaacccttggcgtgtctccttttgttcttccgttcggtgggacacgagtccggggtatagatcccttcggacgccggacctcgttctctccgaacggatgcaggctgaccctaacgccgatgtgctatgtccgttctatgcgtgatatagtgtactgatctgattggagaataccagttcgatacacgttacggagtacgtagttggcttttttacctttgcgacaactgaggttatactttaaagtcgctcgccacaggtccagcccggtttgatatggattacggaagatgtcacgagttgagctttaccctaattgggtcatggccaaaatattcaaagccctctcttttagtctaatcaacctgaatccggaccctcttagacaaataaacacctctcaaagccttggatattaacatttatgctaaaccaaaataaaggagtcatgttgtcggtgcttgatcccgcagattgcggggttgctaacgtcatgtcgcttaaaaaatttagagtacatgctatgcccttctttccccgcctatctcatccttcgagagcaaatcacataaaaggaaccgcatcatgtccgaacaagctgctttccacttcctgcctttgggcgccatcatccaaaccttctccgtcggtggtaagaacatcgttctgaatttccctacgcaggaggactatgtcaagcacaataccccacactatggtgccaccatcggccgtgttgcaaaccgtatcaaggatggtctgattcaggagctaaatggccagaaggttcaactggtgcagaacaacggccctaattccctgcatggtggggagaacaattgggctaagcgcgtctttgacggcccattcaccgtccagcgcaatggtcacgatgccgtgcacttcaagtacctctgcagagatggttcggagggattccccgggaccatcgaggtgcgcgtgtggtacatcgctagcaacgaggacgccaagaccgtgctgacggccgagtacgaggtggaatttgttggcaacgagtacgaggtggaatttgttggcaacgagtgcgaggagactgtagttaatatcaccaaccacaggtagatctagccccttcccccttcaaagctgatgacgacattcaatcttgaaattggagctattccccgctgaccaagcttccccccacctctcacagctactttaacattggcgatggccccgatattttaggcaccaccgcccagctcgctacagccgactatctgcccctcgatagcacgggcattccctcgggtgagatcgccaagttcccgcgggacgtgacagccccgttcgcgctcgccgcaaccggcgcacacttcgacgacgtctttgtgctcgagtccgatcctagcaaaatccccctggacactcgtggcttaccgctacgccgtctagcccagtttagcaatgcaagctcgggcctacatctcgaagtgtacagcaccgagcctgccttccaattctacactggcaagtacctcgatgtgccatcggtcaacggggcaccagcacatcatgaaggagctgcattctgtgtggaacctagtcggttcgtgaatgcgattaacgagcctgcgtggcggtccatggttctgctgaagaagggtcaactgtttggctgcaagactgtttacaaggcgtggaaggcctgaaggggcctaaaagaggatagcagtatggagtcctgggtacatcggtggatcttgagacatttttcagcattcaagtcaagaggagtggagatcgacctagccatgtatgtatctttgattactatacaaggaacctcggcattgtatagacattgtaatcccaaaagaattttaaaaaaataaaagaataaaaaataaaatgccgaagccgaccaagttatctccgtcgtcccgggtcctcggcagcccgtgtttccctttggaatttgagttcttcttgtatcagatgattctctgcgttcatatatgcgaacgtctctcttgtcacctaacgagatacctctatatacctaggagatatgtagtatgtgtagaggtataccaactcaaaacaattacccaattcgtgaccttcgtgacccgctctcttcgagaataatctcttctccactgtgaatgtcaagcccgtgacgatctatcttttttagtgtgccgcattcccggaatgtggcgctataagatactattagttttttttattcttattgttacggatataggatttgttttagggtttgcttatagttagctatattacgcgataatctacaacaatctcaataataggacacaaccatatggcctgttagcctgggcttactctttttgcgtagtttaatctatctgggtgtatgttgaatcactaattgactacatgtaactgactacatgtattatcgtatactcccacgtgacctcggccacaatcggactccggaccgggccaacccgagcttcttcaccccgcgcgggggaacttcgacatgcgaacacgcggatcaacacaacttctccaaataccttaatccaattcattattcaatctactccacttacaatggccctggctcacggagacctgcgccatctactacccggcaactacaagcgcttcatcacatcttggctggaagaggactgccctagtctggactatggcggttttgttgtcggcgagtcagagggcgaggcccgactactaggaaagagcaaggtaaagagacagtgtctataatagattttcctaatccccccccccccaagaaagaacattcactgatcaactcagggcatcgtcgcaggcgtaccattcttcgacgaggtattctcgcaactaggctgcacgtaagccataccccactccaatcccaccccacctctctaatccatccagaatcgaatggcacatcaaagaaggcgaagcaatcaccccaattcagcactgcgcaaccgtccgcggccccatccgcaagatcctcctcggcgagcgcgtagccctcaacattctcgcgcgttgctcaggcatcgccagcaagagcgcctccatgcttgctgcgctgcgcgcgcaaggatggcaaggtaccctggccggtacaaggaagacaacgcctgggttccggcttgttgagaaatacggaatgcttgcgggtggcgccgacccgcaccgccacgatttgagctccatgaccatgctaaaggacaaccacgtgtgggcgtgcgcgaacaaccgcgctgcagccgatggtggcgttgcggacccgtcatcgcttgagtctattgcggcggcgatcccgcgcgctgtgcaggcggccaaggcaactggtgggttctcgactaaggttgaggttgagtgtcggagtgtggaggaggctaatgcggcgattggggctggggccgatatcattatgttggataactttacgcctgagggtgtgcgggaggctgcggcgcagctgaagcgcgaatgggcttcgaagaggcctttcttgattgaggtgagtggtggattgacggaagagaatgcgccggcgtatgtatgtgccgatatcgatatcttgtctaccagctccatccaccagggtacggggattgtggatttctcgctcaaggtatcgttgcggtagaaatgtatcatcgaattttggatgcatcctaatagagcagcatatcgacgtgtataaagtacaacgaaagaagaataaaatgcacaaaaaactccgacagtccctcaacaaggtattttagccccgaataacattaaaataaaagcctttcctcatgagtgattattacaagcatatgcgataagtgtcacgtggaagagaaacacaaacagacagtgggtatatatagcataggaaaaaaaagcgcggcaaaatcaaacttcgatgtccacggtgatgccctccccttcactggagctgggagcctcatctgaacccggagggcgactgggacggttgccatctgcaatggtccctgaaggtcctcgccgcctacgttcccggttgagctgatctcgaagtttctgattctcagcatcgcgctcctcaagtcgctcgcgggcgccactgcgatctaggaggcgaccttcacgttcagatttgagttgcctctccagcccatgtagtctgtgaatccatttctcatcgctaccattccagccactttgcgagctgcgcgtgcgtggtatcattgttccaggattgttggccaacgtgctgctggaagaggaatgagagggctgccctgtaacgttgcgagtggcgcctttctcggcgcgaggtctatcagtaccagccgtagagctagaacgccctagggatcggtccgactctgctcttgacgtcaaagaaggggagcggggtcctgccatgactgcagccgcagccgcagccacagacgcaggaccctgtcctcgcgcgttggnnnnnnnnnnnnnnnnnnnnnnnnnnnnnnnnnnnnnnnnnnnnngcaaaagaggggggggggggtcctgccatgactgcagccgcagccgcagccacagacgcaggaccctgtcctcgcgagttggattgaagtaggttgagttcagcctttagcagacggttctcgccacgcaatttagacatctccggagtggaactcgattgtccgcgaccggatcgcatgtttttgaaagcctcttcgaggcgctcgagcttcttgattcgtccgttatatgacagctcaagcgtgtgataacgcttggtcaactcgtggtcgatgctcttgatgcgagacttgaaacccgccatcacagcctcgacagtcttcattgcaagcagaaggttgcggctgaagcctggccagaacagcatattaccaatgacctcctggctcgggagattgccattgataagactgttggagtgcgcccaatccggcccgcaaagcccagagattctcttccaaatgttaagaaacatgatgttcctctcgttgagctggtccttgaattgctgttccagcgatgcgtatcttttgcggtcctcggtccgcgctttttccagatctgtgatacgggaattgctttgtgtgatggtccgagatgcgtgctgatgagatttgagcgacgactcaaatgactgcttgtcggctcgacgcgcatgtctttcgcgatccaggagttctgagagttttcgtgactcaagcccatgactctcgagcagagcgtcacgatttcgaagcagagattctttctcatctagctgtgagcggacgctctctaactcaagggcggtggactcgagttccttttgcagcttcatgatgttggtgatcaagctagaccggctgccgctgagatcacctagcgtttccctcaaattgttttcgaggtccatcaaccgttctcgccaggtggaggtttcaatctcctgggctgaaaggctcttcttcagacgtcggacctcctctttggaagctgaagcttcgcggttcaattcattcatgatacgctggacatcttgcttctccttacttcctaccacctctcgctggtgacgttcatctgccagtcgctgctcgagttctctggtcttctctttttcactaaccaagctcaggtggtagtttttgaggtccgattcgagatctccgatgcggatcttatcgccgtcttgctcttcgcgaaggaaagcgatttcattttggctcgattcaatctgcaccgtcagccgctgcaccttagtgttggcctcaaataggctcttctccatagattccatctcgcgattggtctcttcaagttcctgctgcacagacttgtacgcggccaggttgttctgtgcatcttcctcgagacggatgatgccttcgctggcagaacgcatttcggcctgcaaagccctgaggttttcgtcttggtttctcaagtcctcattcatacgctggcactcaacaattttctggtcgagttcgtctccaagggtatccaactcttcctgcgcttcggcccgcaggtcctggaaagcggcatctctttcattcgccatgtttacggcctggtctcgttcttgctgtaggttttgcatctcttcttcggcttgatcaacatcagcttggtatgccttgtcaagagcctctagttctgcaatatagtcctcaagttcggctcggatggcttgattctcaagcttgagggtcgacactaagtcccggagttgtccattccgggcttcgagttcatcgtggtccatgtcgctgcgcgacatacccgttccgtcgctagcctgagacgaaggtcggacatgagtgcgcgaggcggaacggtcgaagatactgtctcccgctatggatcggccaacatgacgacgctctccgagcttcaattcttcaatctcctgataaagacgttccttttctcggttacgagatgtgagcattgaagtctgggcactgacttcttttcttagttctgcattctcctgtttaaggagccccagctctacaacaagcgtgctgttgggaacggtaggaactcggttgccatctctatcagatgtatatgaaaaagagtcgtattggccgggctttgtagcagcgtatatctcacttcgcaaacgaatcgactcatcccgaagtcttcgattttcttcctcggcttgctctcgcgctgaggtttctgcgtcaagcatatccttccacatctcctgtatatataattagctcgggtctgacttgatcgtgttcgtctcacttactcgctcttccctcgcgccggcgtcggactctcccgcacgattatcgctgagcgacctgatcatctcggccaaccgtctcttctcactttcccgtgcaatagtttctgacctcatacgctcaatctcgagttcataagtttcaacccgttcacgtaggaagacgatctcttcgtcttgggccgagtcacgatcgccatcctctgatccctcggggtcatgattgaccatggaatccttgtcggattgatgttctttcacttgcttttccaagtctcgaatcttgcgtcttaggctttgattgtcctttgagagcttgaccttatctgattttagctcaacattctccgagatcatctccttgatgccttcctcggatcgcttgttcaacgcctcattaagaaagtgaattcgcatttttaggtcaaaattctccttcgccaagcgatcaatggtgctgctctgttccttgagggtcaagttccgaccacttttcgcaaacgcaggggccgaggcacccaaacgcttctccggaagtgcttggaagtcttctcggaaccgttgtgcaaacgtggtaggaatttgaatgtccttagctcgctcggcaattgctgtatcagtaggattgctgtcttgtggcttcgctttgggtgtcatcggtgttgaggcgtcttcgtggtccacagggctgatacgggaatgtggtgagccttcctcctccagcgtatgtaggccgccgtccattggaccagacatgtttgctttgtcgagtgggttttcttcgctatacccggagattccagatgccatgctgccgagactggttgtcctagccatcttggcacggctttcagcgtgcatggttccatagttgtcagaagtcgcgcccccagtttgaagggcatagtccgcgcccagtgtggcatcgctgttggttgtttcggtgttgttactggcggctgatgagtgtgacgaacgattggttgattgtcggctagtcaggtacttgggtcggctagctctccgactaccagtaggactggtactctggtcattagataagtgcgacgcaccgggcgataggctgcgggaggtgtttcgaagcttcgagggggtaagttgcgattcgttctcggccatggaatattcaggtctgaagggacgctcatcttgggagagcgggctggtttctagtgcatttttggacaatgtggatcgagtttgtcgcagcgctgcagctaccgtaggtgacgaggagtgggagtaagacaaggtattgttcgcatgttgtcctgtagggccaggtgccgagtccaaattcgtacctggcttctccttctcggtgtgttcttcgtcttccaccgggattttatcggctggttctatgaatgagagctgtgaggagtcctgtattatgtctgcagtgccattcttcggaaccccaactaggtacgtatcatccgcgccagcagtaggaccggtcgcagccacgtcaattgttgagggttccggcagaaagctcgattcaatgtccataagtttgcgacgcatttcgtgctcttcaattagggtttggttattgtcgcgttcgtggtcgccattttcgctcgatggatggaatagactgctctcgtcgtggtcaaccgaggaaggaataaaactatgatcgttcaaatctaattgggtcgatgtcatggtaaattcagggtcttcatggtcttcatggtcttggtctccatgatccggctctgaaggagttgattgcgcgtattcagatggcgactgtgtgaccgagttcgggggaagaatccccggtgcgtcctctgccatgaagtactctgaactgaaatcattcaatgtctgatctggcgtctggaataccgacacagacgaagagcgcactgaaactggggagatgacgcccaatgtttggggatccactcgctggatctcgctacccgcctcgatcggcgaatgagcggtcattgtatttggatgtatgggaaaagttgagaaagttgagaaagtcgcgaagagatggatttgtagtgttcaaattaagtgaagatgaaggtctgacttgaattcgaacatacttgaaagtcatctggcaagagcatatggcacaggagtagacgaatagtgtggacacggccaggataatgtaatggtattgccacgcagtatatataacatattcattactgccacgcgcatatcactcgactatacaacaagcatcgagaatcgagaatcgaatcaacagaaatatacaaatcgatgacattcatatgtaaaaacgataatcatggtatccatagcatcacatcaccatcccaagcattaatcggaataatccacccataacagaacattaataggaaagaggtatactagacaaagttgtatcaaacaaaagtcacgaaaaaaaaaagagaaaaggaccaagatatcgggcccttttgaaaggtaggtatcatggagtttccccaagccagaaaaaaaagaagtatatacagccggttcattaaaaggcgaaaagagaaagagtgtgcaattacgctgcaacttccgtaggctcaatggttgcctcctcatccacttgggggtagttggttgaagcaagaattctctctttagagctgatggcgttgcgtagggagtcgatatacgtgcgaaacttaacaatctcacgtaacagatacgaagatttccgttcccagttggccatggctttagcggcgttggggtggcgtggagagaatgcaaggttcatcgcagaacgcagctcattgtggcgagagagatcatcttccacgttctgcacgtagccctgcagggccttcaactgttcctcctctgtcaggttggaggcgaccatgctttgctgtggtgggctccagtcactgatgttgacccgatccgcgggaagtcggggccgcacaccctgatgatccatggagcttcggatggagctttgaatacttggccgtgcgcctgacgaaggcggcggggatcgattttcaccgccgatcagcgcgctgttaatgacactgtcgctccatccatattcaatattgctgatgcctcctatcagtggttgcttggataatcgcgcgctccagtagttggccgtggagacaaattctcggacaatctcaggcgttccagcttggaagagatgaaccgccccagtgggcaaactcagggcccagacatgaggacgagacttggagtatccaggcgatggtaaggcactggcaatggtctggcgcagcatgaacttccaaagctcttctgcattttccgtccagttgccaccaccgactataacccctccgcgctgtttagacttttgtcgcattgacttggtggagttgttgaacgagaaaagacgcatccagccttgctgtataaccgcaaaacagtcattccagttccggtccttggcccgtttgtccaccgcgtctagatgatgcttgtgttttaggctcccctccttggcccacggggcgccggctagagctaacgtatcatcttcaagcagaggggtcgttcgctcgggctcctcgtagctgtataccgaggtagcagagtcctccctgatgatggcctgactcagagcattggcaaacccgatagattgttg
